(19) United States
(12) Patent Application Publication
(10) Pub. No.: US 2003/0108963 A1
(43) Pub. Date: Jun. 12, 2003

(54) Novel genes, compositions, kit, and methods for identification, assessment, prevention and therapy of prostate cancer

(75) Inventors: Robert Schlegel, Auburndale, MA (US); John E. Monahan, Walpole, MA (US); Wilson O. Endege, Norwood, MA (US); Manjula Gannavarapu, Acton, MA (US); Bella O. Gorbatcheva, Waltham, MA (US); Sebastian Hoersch, Arlington, MA (US); Shubhangi Kamatkar, Newton, MA (US); Angela M. Quinn, Waltham, MA (US); Karen Glatt, Natick, MA (US); Xumei Zhao, Wayland, MA (US); Dustin L. Anderson, Brighton, MA (US)

Correspondence Address: LAHIVE & COCKFIELD, 28 STATE STREET, BOSTON, MA, 02109, US

(73) Assignees: MILLENNIUM PHARMACEUTICALS, INC., Cambridge, MA; Mayo Foundation for Medical Education and Research, Rochester, MN

(21) Appl. No.: 10/205,823

(22) Filed: Jul. 25, 2002

Related U.S. Application Data
(60) Provisional application No. 60/307,982, filed on Jul. 25, 2001.
(60) Provisional application No. 60/314,356, filed on Aug. 22, 2001.
(60) Provisional application No. 60/325,020, filed on Sep. 25, 2001.
(60) Provisional application No. 60/341,746, filed on Dec. 12, 2001.
(60) Provisional application No. 60/362,158, filed on Mar. 5, 2002.

(51) Int. Cl. G01N 33/574; C07H 21/04; C12N 9/00; C12P 21/02; C12N 5/06; C07K 16/30; C07K 14/47

(52) U.S. Cl. 435/7.23; 435/69.3; 435/183; 435/320.1; 435/325; 530/388.26; 530/350; 536/23.2

(57) ABSTRACT

The invention relates to newly discovered nucleic acid molecules and proteins associated with prostate cancer including pre-malignant conditions. Compositions, kits, and methods for detecting, characterizing, preventing, and treating human prostate cancers are provided.

### RELATED APPLICATIONS

[0001] The present application claims priority from U.S. provisional patent application serial No. 60/307,982, filed on Jul. 25, 2001, and from U.S. provisional patent application serial No. 60/314,356, filed on Aug. 22, 2001. The present application also claims priority from U.S. provisional patent application serial No. 60/325,020, filed on Sep. 25, 2001, and from U.S. provisional patent application serial No. 60/341,746, filed on Dec. 12, 2001. The present application additionally claims priority from U.S. provisional patent application serial No. 60/362,158, filed on Mar. 5, 2002. All of the above applications are expressly incorporated by reference.

### FIELD OF THE INVENTION

[0002] The field of the invention is prostate cancer, including diagnosis, characterization, management, and therapy of prostate cancer.

### BACKGROUND OF THE INVENTION

[0003] The increased number of cancer cases reported in the United States, and, indeed, around the world, is a major concern. Currently there are only a handful of treatments available for specific types of cancer, and these provide no absolute guarantee of success. In order to be most effective, these treatments require not only an early detection of the malignancy, but also a reliable assessment of the severity of the malignancy.

[0004] Carcinoma of the prostate (PCA) is the most frequently diagnosed cancer in men in the United States, and is the second leading cause of male cancer deaths (Karp et al., 1996, Cancer Res. 56:5547-5556). The acute susceptibility of this organ to cancer in men is not understood. Skenes glands represent a tissue in females that is homologous to the male prostate, but not a site where significant neoplastic transformation is observed.

[0005] An unusual challenge presented by prostate cancer is that most prostate tumors do not represent life threatening conditions. Projections from autopsy surveys indicate that as many as 11 million American men have prostate cancer (Dhom, 1983, J. Cancer Res. Clin. Oncol., 106:210-218). These figures are consistent with clinical observations of prostate carcinomas, which normally exhibit a slow and lingering course of progression. Such disease progression results in relatively few prostate tumors developing into cases of clinical concern during the lifetime of the patient. If, upon detection with available methods, the cancer appears well-differentiated, focal and organ-confined, treatment normally cannot extend the life expectancy of older patients.

[0006] Unfortunately, the prostate carcinomas that are progressive in nature frequently have already metastasized by the time of clinical detection with available methods. Survival rates for individuals with metastatic prostate cancer are quite low. Between these two extremes are patients with prostate tumors that will metastasize during their lifetimes, but have not yet done so. For these patients, surgical removal of the prostate is curative and extends life expectancy. Therefore, accurate determination of which group a newly diagnosed patient falls into is critical in determining optimal treatment and patient survival.

[0007] Currently there is at least one early and noninvasive test available to the physician for detecting asymptomatic disease. The presence of Prostate Specific Antigen (PSA) can be measured with relative ease from blood samples using standard antibody-based detection kits. Abnormally high levels of this antigen in a patient's serum indicate a likelihood of prostate disease, possibly either a carcinoma, Benign Prostatic Hyperplasia (BPH) or prostatitis. In the majority of cases, PSA elevation is due to BPH or prostatitis rather than carcinoma.

[0008] Although clinical and pathologic stage and histological grading systems (e.g., Gleason's) have been used to indicate prognosis for groups of patients based on the degree of tumor differentiation or the type of glandular pattern (Carter and Coffey, In: J. P. Karr and H. Yamanak (eds.), Prostate Cancer: The Second Tokyo Symposium, pp. 19-27, New York: Elsevier, 1989.; Diamond et al., J. Urol., 128: 729-734, 1982), these systems do not adequately predict the progression rate of the cancer. While the use of computer-system image analysis of histologic sections of primary lesions for “nuclear roundness” has been suggested as an aide in the management of individual patients (Diamond et al., 1982, J. Urol., 128:729-734), this method is of limited use in studying the progression of the disease.

[0009] The analysis of DNA content/ploidy using flow cytometry and FISH has been demonstrated to have utility predicting prostate cancer aggressiveness (Pearsons et al., 1993, J. Urol., 150:120-125; Macoska et al., 1994, Cancer Res., 54: 3824-3830; Visakorpi et al., 1994, Am. J. Pathol., 145:1-7; Takahashi et al., 1994, Cancer Res., 54:3574-3579; Alcaraz et al., Cancer Res., 55:3998-4002, 1994), but these methods are expensive, time-consuming, and the latter methodology requires the construction of centromere-specific probes for analysis. There also exist specific nuclear matrix proteins whose expression has been reported to be associated with prostate cancer. However, these protein markers apparently do not distinguish between BPH and prostate cancer (Partin et al., 1993, Cancer Res., 53:744-746). Unfortunately, markers that cannot distinguish between benign and malignant prostate tumors are of little value.

[0010] It would therefore be beneficial to provide methods and reagents for the diagnosis, staging, prognosis, monitoring, and treatment of prostate cancer.

### SUMMARY OF THE INVENTION

[0011] The invention relates to cancer markers (hereinafter “markers” or “markers of the invention”), which are listed in Table 1. The invention provides nucleic acids and proteins that are encoded by or correspond to the markers (hereinafter “marker nucleic acids” and “marker proteins,” respectively). In particular, Table 1 lists all of the markers of the invention, which are over-expressed in prostate cancer cells compared to normal (i.e., non-cancerous) prostate cells and comprises markers listed in Tables 2-6. Table 2 lists markers particularly useful in screening for the presence of prostate cancer (“screening markers”). Table 3 lists markers particularly useful in assessing aggressiveness and metastatic potential of prostate cancer (“aggressiveness markers”). Table 4 lists markers particularly useful in both screening for the presence of prostate cancer as well as for assessing aggressiveness and metastatic potential of prostate cancer. Table 5 lists newly-identified nucleotide and amino acid sequences useful as prostate cancer markers. Table 6 lists newly-identified nucleotide sequences useful as prostate cancer markers.

[0012] The invention further provides antibodies, antibody derivatives and antibody fragments which specifically bind with the marker proteins and fragments of the marker proteins of the present invention.

[0013] The invention also relates to various methods, reagents and kits for diagnosing, prognosing, monitoring and treating prostate cancer. “Prostate cancer” as used herein includes carcinomas, (e.g., carcinoma in situ, invasive carcinoma, metastatic carcinoma) and pre-malignant conditions. In one embodiment, the invention provides a diagnostic method of assessing whether a patient has prostate cancer or has higher than normal risk for developing prostate cancer, comprising the steps of comparing the level of expression of a marker of the invention in a patient sample and the normal level of expression of the marker in a control, e.g., a sample from a patient without prostate cancer. A significantly higher level of expression of the marker in the patient sample as compared to the normal level is an indication that the patient is afflicted with prostate cancer or has higher than normal risk for developing prostate cancer.

[0014] According to the invention, the markers are selected such that the positive predictive value of the methods of the invention is at least about 10%, preferably about 25%, more preferably about 50% and most preferably about 90%. Also preferred for use in the methods of the invention are markers that are differentially expressed, as compared to normal prostate cells, by at least two-fold in at least about 20%, more preferably about 50% and most preferably about 75% of any of the following conditions: stage T1 prostate cancer patients, stage T2 prostate cancer patients, e.g., stage T2N0, stage T3 prostate cancer patients, stage N+prostate cancer patients, stage M+prostate cancer patients, all prostate cancer substages, and all other types of cancers, malignancies and transformations associated with the prostate.

[0015] In a preferred diagnostic method of assessing whether a patient is afflicted with prostate cancer (e.g., new detection (“screening”), detection of recurrence, reflex testing), the method comprises comparing:

[0016] a) the level of expression of a marker of the invention in a patient sample, and

[0017] b) the normal level of expression of the marker in a sample from a control subject having no prostate cancer.

[0018] A significantly higher level of expression of the marker in the patient sample as compared to the normal level is an indication that the patient is afflicted with prostate cancer. In a preferred embodiment, the marker is selected from the markers in Table 2.

[0019] The present invention further provides a method for determining whether prostate cancer has metastasized or is likely to metastasize in the future, the method comprising comparing:

[0020] a) the level of expression of a marker of the invention in a sample from the patient and

[0021] b) the level of expression of the same marker in a sample from a control subject having non-metastasized prostate cancer.

[0022] A significantly increased level of expression of the marker genes in the patient sample, relative to the level of expression in the control, is an indication that the patient is afflicted with metastatic prostate cancer that has metastasized, or is likely to metastasize in the future. In a preferred embodiment, the marker is selected from the markers in Table 3.

[0023] The invention also provides diagnostic methods for assessing the efficacy of a therapy for inhibiting prostate cancer in a patient. Such methods comprise comparing:

[0024] a) expression of a marker of the invention in a first sample obtained from the patient prior to providing at least a portion of the therapy to the patient, and

[0025] b) expression of the marker in a second sample obtained from the patient following provision of the portion of the therapy.

[0026] A significantly lower level of expression of the marker in the second sample relative to that in the first sample is an indication that the therapy is efficacious for inhibiting prostate cancer in the patient.

[0027] It will be appreciated that in these methods the “therapy” may be any therapy for treating prostate cancer including, but not limited to, chemotherapy, radiation therapy, surgical removal of tumor tissue, gene therapy and biologic therapy such as the administering of antibodies and chemokines. Thus, the methods of the invention may be used to evaluate a patient before, during and after therapy, for example, to evaluate the reduction in tumor burden.

[0028] In a preferred embodiment, the diagnostic methods are directed to therapy using a chemical or biologic agent. These methods comprise comparing:

[0029] a) expression of a marker of the invention in a first sample obtained from the patient and maintained in the presence of the chemical or biologic agent, and

[0030] b) expression of the marker in a second sample obtained from the patient and maintained in the absence of the agent.

[0031] A significantly lower level of expression of the marker in the first sample relative to that in the second sample is an indication that the agent is efficacious for inhibiting prostate cancer in the patient. In one embodiment, the first and second samples can be portions of a single sample obtained from the patient or portions of pooled samples obtained from the patient.

[0032] The invention additionally provides a monitoring method for assessing the progression of prostate cancer in a patient, the method comprising:

[0033] a) detecting in a patient sample at a first time point, the expression of a marker of the invention;

[0034] b) repeating step a) at a subsequent time point in time; and

[0035] c) comparing the level of expression detected in steps a) and b), and therefrom monitoring the progression of prostate cancer in the patient.

[0036] A significantly higher level of expression of the marker in the sample at the subsequent time point from that of the sample at the first time point is an indication that the prostate cancer has progressed, whereas a significantly lower level of expression is an indication that the prostate cancer has regressed.

[0037] The invention moreover provides a test method for selecting a composition for inhibiting prostate cancer in a patient. This method comprises the steps of:

[0038] a) obtaining a sample comprising cancer cells from the patient;

[0039] b) separately maintaining aliquots of the sample in the presence of a plurality of test compositions;

[0040] c) comparing expression of a marker of the invention in each of the aliquots; and

[0041] d) selecting one of the test compositions which significantly reduces the level of expression of the marker in the aliquot containing that test composition, relative to the levels of expression of the marker in the presence of the other test compositions.

[0042] The invention additionally provides a test method of assessing the prostate carcinogenic potential of a compound. This method comprises the steps of:

[0043] a) maintaining separate aliquots of prostate cells in the presence and absence of the compound; and

[0044] b) comparing expression of a marker of the invention in each of the aliquots.

[0045] A significantly higher level of expression of the marker in the aliquot maintained in the presence of the compound, relative to that of the aliquot maintained in the absence of the compound, is an indication that the compound possesses prostate carcinogenic potential.

[0046] In addition, the invention further provides a method of inhibiting prostate cancer in a patient. This method comprises the steps of:

[0047] a) obtaining a sample comprising cancer cells from the patient;

[0048] b) separately maintaining aliquots of the sample in the presence of a plurality of compositions;

[0049] c) comparing expression of a marker of the invention in each of the aliquots; and

[0050] d) administering to the patient at least one of the compositions which significantly lowers the level of expression of the marker in the aliquot containing that composition, relative to the levels of expression of the marker in the presence of the other compositions.

[0051] In the aforementioned methods, the samples or patient samples comprise cells obtained from the patient. The cells may be found in a prostate tissue sample collected, for example, by a prostate tissue biopsy or histology section, or a bone marrow biopsy. In another embodiment, the patient sample is a prostate-associated body fluid. Such fluids include, for example, blood fluids, lymph, urine, prostatic fluid and semen. In a further embodiment, the patient sample is in vivo.

[0052] According to the invention, the level of expression of a marker of the invention in a sample can be assessed, for example, by detecting the presence in the sample of:

[0053] the corresponding marker protein or a fragment of the protein (e.g. by using a reagent, such as an antibody, an antibody derivative, an antibody fragment or single-chain antibody, which binds specifically with the protein or protein fragment)

[0054] the corresponding marker nucleic acid , or a fragment of the nucleic acid (e.g. by contacting transcribed polynucleotides obtained from the sample with a substrate having affixed thereto one or more nucleic acids having the entire or a segment of the sequence of any of SEQ ID NO (nts), or a complement thereof)

[0055] a metabolite which is produced directly (i.e., catalyzed) or indirectly by the corresponding marker protein.

[0056] According to the invention, any of the aforementioned methods may be performed using a plurality (e.g. 2, 3, 5, or 10 or more) of prostate cancer markers, including prostate cancer markers known in the art (e.g., PSA). In such methods, the level of expression in the sample of each of a plurality of markers, at least one of which is a marker of the invention, is compared with the normal level of expression of each of the plurality of markers in samples of the same type obtained from control subjects not afflicted with prostate cancer. A significantly altered (i.e., increased or decreased as specified in the above-described methods using a single marker) level of expression in the sample of one or more markers of the invention, or some combination thereof, relative to that marker's corresponding normal or control level, is an indication that the patient is afflicted with prostate cancer. For all of the aforementioned methods, the marker(s) are preferably selected such that the positive predictive value of the method is at least about 10%.

[0057] In a further aspect, the invention provides an antibody, an antibody derivative, or an antibody fragment, which binds specifically with a marker protein or a fragment of the protein. The invention also provides methods for making such antibody, antibody derivative, and antibody fragment. Such methods may comprise immunizing a mammal with a protein or peptide comprising the entirety, or a segment of 10 or more amino acids, of a marker protein, wherein the protein or peptide may be obtained from a cell or by chemical synthesis. The methods of the invention also encompass producing monoclonal and single-chain antibodies, which would further comprise isolating splenocytes from the immunized mammal, fusing the isolated splenocytes with an immortalized cell line to form hybridomas, and screening individual hybridomas for those that produce an antibody that binds specifically with a marker protein or a fragment of the protein.

[0058] In another aspect, the invention relates to various diagnostic and test kits. In one embodiment, the invention provides a kit for assessing whether a patient is afflicted with prostate cancer. The kit comprises a reagent for assessing expression of a marker of the invention. In another embodiment, the invention provides a kit for assessing the suitability of a chemical or biologic agent for inhibiting prostate cancer in a patient. Such a kit comprises a reagent for assessing expression of a marker of the invention, and may also comprise one or more of such agents. In a further embodiment, the invention provides kits for assessing the presence of prostate cancer cells or treating prostate cancers. Such kits comprise an antibody, an antibody derivative, or an antibody fragment, which binds specifically with a marker protein, or a fragment of the protein. Such kits may also comprise a plurality of antibodies, antibody derivatives, or antibody fragments wherein the plurality of such antibody agents binds specifically with a marker protein, or a fragment of the protein.

[0059] In an additional embodiment, the invention also provides a kit for assessing the presence of prostate cancer cells, wherein the kit comprises a nucleic acid probe that binds specifically with a marker nucleic acid or a fragment of the nucleic acid. The kit may also comprise a plurality of probes, wherein each of the probes binds specifically with a marker nucleic acid, or a fragment of the nucleic acid.

[0060] In a further aspect, the invention relates to methods for treating a patient afflicted with prostate cancer or at risk of developing prostate cancer. Such methods may comprise reducing the expression and/or interfering with the biological function of a marker of the invention. In one embodiment, the method comprises providing to the patient an antisense oligonucleotide or polynucleotide complementary to a marker nucleic acid, or a segment thereof. For example, an antisense polynucleotide may be provided to the patient through the delivery of a vector that expresses an anti-sense polynucleotide of a marker nucleic acid or a fragment thereof. In another embodiment, the method comprises providing to the patient an antibody, an antibody derivative, or antibody fragment, which binds specifically with a marker protein or a fragment of the protein. In a preferred embodiment, the antibody, antibody derivative or antibody fragment binds specifically with a protein having the sequence of a SEQ ID NO (AAs), or a fragment of the protein.

[0061] It will be appreciated that the methods and kits of the present invention may also include known cancer markers including known prostate cancer markers. It will further be appreciated that the methods and kits may be used to identify cancers other than prostate cancer.

### DETAILED DESCRIPTION OF THE INVENTION

[0062] The invention relates to newly discovered cancer markers associated with the cancerous state of prostate cells. It has been discovered that the higher than normal level of expression of any of these markers or combination of these markers correlates with the presence of prostate cancer in a patient. Methods are provided for detecting the presence of prostate cancer in a sample, the absence of prostate cancer including pre-malignant conditions such as dysplasia, in a sample, the stage of a prostate cancer, and with other characteristics of prostate cancer that are relevant to prevention, diagnosis, characterization, and therapy of prostate cancer in a patient. Methods of treating prostate cancer are also provided.

[0063] Table 1 lists all of the markers of the invention, which are over-expressed in prostate cancer cells compared to normal (i.e., non-cancerous) prostate cells and comprises markers listed in Tables 2-6. Table 2 lists markers particularly useful in screening for the presence of prostate cancer (“screening markers”). Table 3 lists markers particularly useful in assessing aggressiveness and metastatic potential of prostate cancer (“aggressiveness markers”). Table 4 lists markers particularly useful in both screening for the presence of prostate cancer as well as for assessing aggressiveness and metastatic potential of prostate cancer. Table 5 lists newly-identified nucleotide and amino acid sequences useful as prostate cancer markers. Table 6 lists newly-identified nucleotide sequences useful as prostate cancer markers.

[0064] The Tables list the markers which are designated with a name (“Marker”), the name the gene is commonly known by, if applicable (“Gene Name”), the sequence listing identifier of the cDNA sequence of a nucleotide transcript encoded by or corresponding to the marker (“SEQ ID NO (nts)”), the sequence listing identifier of the amino acid sequence of a protein encoded by the nucleotide transcript (“SEQ ID NO (AAs)”), and the location of the protein coding sequence within the cDNA sequence (“CDS”).

TABLE 1

| | | SEQ | SEQ | |
|---|---|---|---|---|
| | | ID NO | ID NO | |
| Marker | Gene Name | (nts) | (AAs) | CDS |
| M245 | ABCC4: MRP4, MOATB, ATP-binding cassette, | 1 | 2 | 116..4093 |
| | sub-family C (CFTR/MRP), member 4 | | | |
| M246 | ACAD8: acyl-Coenzyme A dehydrogenase | 3 | 4 | 89..1336 |
| | family, member 8 | | | |
| M361 | ADAM2: disintegrin and metalloproteinase | 5 | 6 | 80...2338 |
| | domain 2, variant 1 | | | |
| M362 | ADAM2: disintegrin and metalloproteinase | 7 | 8 | 179..2386 |
| | domain 2, variant 2 | | | |
| M363 | ADAM2: disintegrin and metalloproteinase | 9 | 10 | 72..2276 |
| | domain 2, variant 3 | | | |
| M497 | ALCAM: activated leucocyte cell adhesion | 11 | 12 | 64..1815 |
| | molecule | | | |
| M247 | ALDH1A3: aldehyde dehydrogenase 1 family, | 13 | 14 | 53..1591 |
| | member A3 | | | |
| M498 | ALP: alpha-actinin-2-associated LIM protein | 15 | 16 | 71..1165 |
| M683 | AMACR: alpha-methylacyl-CoA racemase, | 17 | 18 | 90..1238 |
| | variant 1 | | | |
| M684 | AMACR: alpha-methylacyl-CoA racemase, | 19 | 20 | 90..1274 |
| | variant 2 | | | |
| M685 | AMACR: alpha-methylacyl-CoA racemase, | 21 | 22 | 90..686 |
| | variant 3 | | | |
| M686 | AMACR: alpha-methylacyl-CoA racemase, | 23 | 24 | 66..932 |
| | variant 4 | | | |
| M248 | AMACR: alpha-methylacyl-CoA racemase, | 25 | 26 | 90..1238 |
| | variant 5 | | | |
| M249 | AMACR: alpha-methylacyl-CoA racemase, | 27 | 28 | 90..1274 |
| | variant 6 | | | |
| M365 | AMACR: alpha-methylacyl-CoA racemase, | 29 | 30 | 13..609 |
| | variant 7 | | | |
| M499 | ANPEP: alanyl (membrane) aminopeptidase | 31 | 32 | 121..3024 |
| | (aminopeptidase N, aminopeptidase M, | | | |
| | microsomal aminopeptidase, CD13, p150) | | | |
| M250 | ANXA3: annexin A3 | 33 | 34 | 47..1018 |
| M500 | AR: androgen receptor (dihydrotestosterone | 35 | 36 | 1115..3874 |
| | receptor; testicular feminization; spinal and | | | |
| | bulbar muscular atrophy; Kennedy disease) | | | |
| M251 | ATP6J: ATPase, H+ transporting, lysosomal | 37 | 38 | 52..408 |
| | (vacuolar proton pump), member J | | | |
| M501 | AZGP1: alpha-2-glycoprotein 1, zinc, variant 1 | 39 | 40 | 120..1116 |
| M366 | AZGP1: alpha-2-glycoprotein 1, zinc, variant 2 | 41 | 42 | 1..897 |
| M502 | C12orf8: chromosome 12 open reading frame 8 | 43 | 44 | 12..797 |
| M503 | C14orf2: chromosome 14 open reading frame 2 | 45 | 46 | 61..237 |
| M332 | CA4: carbonic anhydrase IV | 47 | 48 | 47..985 |
| M504 | CACNA1D: calcium channel, voltage- | 49 | 50 | 119..6664 |
| | dependent, L type, alpha 1D subunit | | | |
| M252 | CAMKK2: calcium/calmodulin-dependent | 51 | 52 | 159..1829 |
| | protein kinase kinase 2, beta, variant 1 | | | |
| M253 | CAMKK2: calcium/calmodulin-dependent | 53 | 54 | 1..1254 |
| | protein kinase kinase 2, beta, variant 2 | | | |
| M367 | CD24: CD24 antigen (small cell lung carcinoma | 55 | 56 | 57..299 |
| | cluster 4 antigen) | | | |
| M333 | CERD4: cer-d4 (mouse) homolog | 57 | 58 | 14..688 |
| M98 | CGI-52: similar to phosphatidylcholine transfer | 59 | 60 | 277..1356 |
| | protein 2 | | | |
| M254 | CGI-96: CGI-96 protein | 61 | 62 | 175..1146 |
| M255 | CHAF1A: chromatin assembly factor 1, subunit | 63 | 64 | 41..2857 |
| | A (p150) | | | |
| M256 | CLCN5: chloride channel 5 (nephrolithiasis 2, X- | 65 | 66 | 292..2532 |
| | linked, Dent disease) | | | |
| M505 | CLGN: calmegin | 67 | 68 | 102..1934 |
| M368 | CNN1: calponin 1, basic, smooth muscle | 69 | 70 | 79..972 |
| M506 | COF1: cofilin isoform 1 | 71 | 72 | 153..650 |
| M507 | COPB2: coatomer protein complex, subunit | 73 | 74 | 69..2789 |
| | beta 2 (beta prime) | | | |
| M209 | CTBP2: C-terminal binding protein 2 | 75 | 76 | 137..3094 |
| M17 | CTGF: connective tissue growth factor | 77 | 78 | 146..1195 |
| M595 | CTNND1: catenin (cadherin-associated protein), | 79 | 80 | 537..3362 |
| | delta 1 | | | |
| M508 | CYP27A1: cytochrome P450, subfamily XXVIIA | 81 | 82 | 202..1797 |
| | (steroid 27-hydroxylase, cerebrotendinous | | | |
| | xanthomatosis), polypeptide 1 | | | |
| M509 | CYR61: cysteine-rich, angiogenic inducer, 61 | 83 | 84 | 81..1226 |
| M510 | DKFZp434F054: hypothetical protein | 85 | 86 | 1641..4011 |
| | DKFZp434F054 | | | |
| M257 | DKFZP564B167: DKFZP564B167 protein, | 87 | 88 | 158..541 |
| | variant 1 | | | |
| M511 | DKFZP564B167: DKFZP564B167 protein, | 89 | 88 | 368..751 |
| | variant 2 | | | |
| M258 | DKFZP566E144: small fragment nuclease | 90 | 91 | 78..791 |
| M369 | DMN: desmuslin | 92 | 93 | <1..4126 |
| M370 | EGR1: early growth response 1 | 94 | 95 | 271..1902 |
| M259 | EphA3: Ephrin receptor | 96 | 97 | 101..3052 |
| M260 | ERG: v-ets avian erythroblastosis virus E26 | 98 | 99 | 257..1645 |
| | oncogene related transcriptional regulator | | | |
| M371 | ETR101: immediate early protein | 100 | 101 | 101..772 |
| M261 | FABP5: fatty acid binding protein 5 (psoriasis- | 102 | 103 | 49..456 |
| | associated) | | | |
| M262 | FLJ10369: hypothetical protein FLJ10369 | 104 | 105 | 165..953 |
| M263 | FLJ10816: hypothetical protein FLJ10816, | 106 | 107 | 53..1063 |
| | similar to DNA-directed RNA polymerase I | | | |
| M334 | FLJ12752: hypothetical protein FLJ12752 | 108 | 109 | 51..791 |
| M512 | FLJ13409: hypothetical protein FLJ13409, | 110 | 111 | 219..4703 |
| | variant 1 | | | |
| M513 | FLJ13409: hypothetical protein FLJ13409, | 112 | 113 | 219..4589 |
| | variant 2 | | | |
| M264 | FLJ14054: hypothetical protein FLJ14054 | 114 | 115 | 328..693 |
| M514 | FLJ20940: hypothetical protein FLJ20940 | 116 | 117 | 236..742 |
| M335 | FLJ22347: hypothetical protein FLJ22347 | 118 | 119 | 60..2684 |
| M515 | FLJ22684: hypothetical protein FLJ22684 | 120 | 121 | 726..1313 |
| M265 | FLJ23153: hypothetical protein FLJ23153, | 122 | 123 | 104..955 |
| | variant 1 | | | |
| M372 | FLJ23153: hypothetical protein FLJ23153, | 124 | 123 | 104..955 |
| | variant 2 | | | |
| M336 | FLJ23563: hypothetical protein FLJ23563 | 125 | 126 | 135..815 |
| M266 | FMOD: fibromodulin, variant 1 | 127 | 128 | 21..1151 |
| M687 | FMOD: fibromodulin, variant 2 | 129 | 130 | 70..1200 |
| M267 | FOLH1: PSMA, folate hydrolase (prostate- | 131 | 132 | 262..2514 |
| | specific membrane antigen) 1 | | | |
| M516 | FOSB: FBJ murine osteosarcoma viral | 133 | 134 | 594..1610 |
| | oncogene homolog B | | | |
| M517 | FOXD1: forkhead box D1 | 135 | 136 | 413..1810 |
| M373 | FSHPRH1: FSH primary response (LRPR1, rat) | 137 | 138 | 270..2540 |
| | homolog 1 | | | |
| M213 | FXYD3: FXYD domain-containing ion transport | 139 | 140 | 176..439 |
| | regulator 3, isoform 1 | | | |
| M214 | FXYD3: FXYD domain-containing ion transport | 141 | 142 | 260..601 |
| | regulator 3, isoform 2 | | | |
| M518 | FZD8: frizzled (Drosophila) homolog 8 | 143 | 144 | 6..2090 |
| M268 | GALNT3: UDP-N-acetyl-alpha-D- | 145 | 146 | 1..1902 |
| | galactosamine, polypeptide N- | | | |
| | acetylgalactosaminyltransferase 3 | | | |
| M269 | GART: phosphoribosylglycinamide | 147 | 148 | 1..3033 |
| | formyltransferase, phosphoribosylglycinamide | | | |
| | synthetase, phosphoribosylaminoimidazole | | | |
| | synthetase | | | |
| M270 | GJB1: gap junction protein, beta 1, 32kD | 149 | 150 | 63..914 |
| | (connexin 32) | | | |
| M374 | GLUL: glutamate-ammonia ligase (glutamine | 151 | 152 | 123..1244 |
| | synthase), variant 1 | | | |
| M375 | GLUL: glutamate-ammonia ligase (glutamine | 153 | 154 | 431..769 |
| | synthase), variant 2 | | | |
| M271 | GOLPH2: golgi phosphoprotein 2 | 155 | 156 | 151..1353 |
| M272 | GPCR150: putative G protein-coupled receptor | 157 | 158 | 322..1338 |
| M597 | GRIN3A: glutamate receptor, ionotropic, N- | 159 | 160 | 621..3968 |
| | methyl-D-aspartate 3A | | | |
| M220 | GUCY1A3: guanylate cyclase 1, soluble, alpha | 161 | 162 | 520..2592 |
| | 3, variant 1 | | | |
| M221 | GUCY1A3: guanylate cyclase 1, soluble, alpha | 163 | 162 | 386..2458 |
| | 3, variant 2 | | | |
| M222 | GUCY1A3: guanylate cyclase 1, soluble, alpha | 164 | 162 | 407..2479 |
| | 3, variant 3 | | | |
| M199 | HAG-2: anterior gradient 2 (Xenopus aevis) | 165 | 166 | 59..586 |
| | homolog | | | |
| M596 | HARSL: histidyl-tRNA synthetase-like | 167 | 168 | 150..1670 |
| M519 | HCNGP: transcriptional regulator protein | 169 | 170 | 281..1207 |
| M337 | HIS1: HMBA-inducible | 171 | 172 | 690..1769 |
| M273 | HMGCS2: 3-hydroxy-3-methylglutaryl- | 173 | 174 | 52..1578 |
| | Coenzyme A synthase 2 (mitochondrial) | | | |
| M137 | HPGD: hydroxyprostaglandin dehydrogenase | 175 | 176 | 18..818 |
| | 15-(NAD) | | | |
| M274 | HPN: hepsin (transmembrane protease, serine | 177 | 178 | 246..1499 |
| | 1) | | | |
| M275 | HSBP1: heat shock factor binding protein 1 | 179 | 180 | 55..285 |
| M338 | HSPC002: HSPC02 protein | 181 | 182 | 24..515 |
| M376 | HSPE1: heat shock 10kD protein 1 (chaperonin | 183 | 184 | 42..350 |
| | 10) | | | |
| M520 | JM27: JM27 protein | 185 | 186 | 64..372 |
| M276 | JUNB: jun B proto-oncogene | 187 | 188 | 254..1297 |
| M521 | KCNK1: potassium channel, subfamily K, | 189 | 190 | 183..1193 |
| | member 1 (TWIK-1) | | | |
| M277 | KCNN4: potassium intermediate/small | 191 | 192 | 397..1680 |
| | conductance calcium-activated channel, | | | |
| | subfamily N, member4 | | | |
| M340 | KIAA0026: MORF-related gene X | 193 | 194 | 306..1172 |
| M341 | KIAA0056: KIAA0056 protein | 195 | 196 | <1..4525 |
| M278 | KIAA0106: anti-oxidant protein 2 (non-selenium | 197 | 198 | 44..718 |
| | glutathione peroxidase, acidic calcium- | | | |
| | independent phospholipase A2) | | | |
| M342 | KIAA0435: KIAA0435 gene product | 199 | 200 | 1196..3529 |
| M339 | KIAAO6O7: neurochondrin | 201 | 202 | <1..2197 |
| M279 | KIAA0872: KIAA0872 protein | 203 | 204 | 35..1678 |
| M522 | KIAA1497: KIAA1497 protein | 205 | 206 | <3225..5417 |
| M280 | KIAA1877: KIAA1877 protein | 207 | 208 | <105..1709 |
| M523 | KLF4: Kruppel-like factor 4 (gut) | 209 | 210 | 477..1916 |
| M281 | KLK11: kallikrein 11 | 211 | 212 | 122..874 |
| M282 | KLK2: kallikrein 2, prostatic | 213 | 214 | 1..786 |
| M524 | KRT13: keratin 13 | 215 | 216 | 57..1433 |
| M525 | KRT5: keratin 5 (epidermolysis bullosa simplex, | 217 | 218 | 392..2164 |
| | Dowling-Meara/Kobner/Weber-Cockayne types) | | | |
| OV37 | LCN2: lipocalin 2 (oncogene 24p3) | 219 | 220 | 1..597 |
| M283 | LIM: LIM protein, variant 1 | 221 | 222 | 121..1911 |
| M284 | LIM: LIM protein, variant 2 | 223 | 222 | 84..1874 |
| M526 | LMOD1: leiomodin 1 (smooth muscle) | 224 | 225 | 213..1931 |
| M285 | LOC51109: CGI-82 protein, variant 1 | 226 | 227 | 41..997 |
| M286 | LOC51109: CGI-82 protein, variant 2 | 228 | 227 | 41..997 |
| M527 | LOC51123: HSPCO38 protein | 229 | 230 | 182..412 |
| M287 | LOC51137: coat protein gamma-cop | 231 | 232 | 16..2640 |
| M528 | LOC51334: mesenchymal stem cell protein | 233 | 234 | 358..1203 |
| | DSC54 | | | |
| M288 | LOC51635: CGI-86 protein | 235 | 236 | 78..1097 |
| M598 | LOC51646: CGI-127 protein | 237 | 238 | 468..833 |
| M343 | LOC55901: TMTSP for transmembrane | 239 | 240 | 152..2710 |
| | molecule with thrombospondin module | | | |
| M289 | LOH11CR2A: loss of heterozygosity, 11, | 241 | 242 | 1054..2367 |
| | chromosomal region 2, gene A | | | |
| M344 | LRP16: LRP16 protein | 243 | 244 | 53..1030 |
| M290 | LU: Lutheran blood group (Auberger b antigen | 245 | 246 | 23..1909 |
| | included), B-cell adhesion molecule | | | |
| M345 | M160: receptor cysteine-rich type 1 protein | 247 | 248 | 26..4387 |
| | M160 precursor | | | |
| M599 | MAOA: monoamine oxidase A | 249 | 250 | 45..1628 |
| M529 | MAOB: monoamine oxidase B | 251 | 252 | 78..1640 |
| M291 | MCCC2: Methylcrotonoyl-Coenzyme A | 253 | 254 | 100..1791 |
| | carboxylase 2 (beta) | | | |
| M292 | MDS023: MDS023 protein | 255 | 256 | 336..1019 |
| OV39 | MEIS1: MEIS1 protein | 257 | 258 | 66..1238 |
| M232 | MGC3077: hypothetical protein MGC3077 | 259 | 260 | 137..703 |
| M293 | MIPEP: mitochondrial intermediate peptidase, | 261 | 262 | 75..2216 |
| | nuclear gene encoding mitochondrial protein | | | |
| M377 | MLLT2: myeloid/lymphoid or mixed-lineage | 263 | 264 | 421..4053 |
| | leukemia (trithorax (Drosophila) homolog): | | | |
| | translocated to, 2 | | | |
| M294 | MMP7: matrix metalloproteinase 7 (matrilysin, | 265 | 266 | 48..851 |
| | uterine), PUMP1 proteinase, variant 1 | | | |
| OV52 | MMP7: matrix metalloproteinase 7 (matrilysin, | 267 | 266 | 28..831 |
| | uterine), PUMP1 proteinase, variant 2 | | | |
| M530 | MS4A1: membrane-spanning 4-domains, | 268 | 269 | 91..984 |
| | subfamily A, member 1 | | | |
| M295 | MSMB: microseminoprotein, beta- | 270 | 271 | 33..377 |
| M161 | MYO6: myosin VI | 272 | 273 | 140..3997 |
| M296 | NEDD4L: neural precursor cell expressed, | 274 | 275 | <1..2990 |
| | developmentally down-regulated 4-like, variant | | | |
| | 1 | | | |
| M297 | NEDD4L: neural precursor cell expressed, | 276 | 277 | 378..2942 |
| | developmentally down-regulated 4-like, variant | | | |
| | 2 | | | |
| M298 | NEDD4L: neural precursor cell expressed, | 278 | 279 | <1..2738 |
| | developmentally down-regulated 4-like, variant | | | |
| | 3 | | | |
| M164 | NET-6: tetraspan NET-6 protein | 280 | 281 | 163..777 |
| M299 | NKX3A: NK3 transcription factor homolog A | 282 | 283 | 49..753 |
| | (Drosophila) | | | |
| M300 | NMES1: normal mucosa of esophagus specific | 284 | 285 | 190..441 |
| | 1 | | | |
| M55 | NP25: neuronal protein | 286 | 287 | 50..898 |
| M301 | NPY: neuropeptide Y | 288 | 289 | 15..308 |
| M531 | NR4A1: nuclear receptor subfamily 4, group A, | 290 | 291 | 111..1907 |
| | member 1 | | | |
| M302 | NUCB2: nucleobindin 2 | 292 | 293 | 220..1482 |
| M303 | NUCKS: similar to rat nuclear ubiquitous casein | 294 | 295 | 67..558 |
| | kinase 2 | | | |
| M304 | NUDT4: nudix (nucleoside diphosphate linked | 296 | 297 | 13..555 |
| | moiety X)-type motif 4 | | | |
| M600 | OASIS: old astrocyte specifically induced | 298 | 299 | 104..1663 |
| | substance | | | |
| M305 | ODC1: ornithine decarboxylase 1 | 300 | 301 | 335..1720 |
| OV48 | OPN-a: Secreted phosphoprotein-1 | 302 | 303 | 1..942 |
| | (osteopontin, bone sialoprotein) | | | |
| OV49 | OPN-b: Secreted phosphoprotein-1 | 304 | 305 | 88..990 |
| | (osteopontin, bone sialoprotein) | | | |
| OV50 | OPN-c: Secreted phosphoprotein-1 | 306 | 307 | 1..861 |
| | (osteopontin, bone sialoprotein) | | | |
| M306 | ORM2: orosomucoid 2 | 308 | 309 | 1..606 |
| M379 | OVC10-2: hypothetical protein OVC10-2 | 310 | 311 | 1020..1244 |
| M346 | p25: brain-specific protein p25 alpha | 312 | 313 | 34..693 |
| M380 | PBK1: PBK1 protein | 314 | 315 | 6..1559 |
| M381 | PCA3: DD3, Prostate Cancer Antigen 3 | 316 | 317 | 401..553 |
| M532 | PCP4: Purkinje cell protein 4 | 318 | 319 | 59..247 |
| M307 | PEGASUS: Zinc Finger Transcription factor | 320 | 321 | 300..1559 |
| | PEGASUS | | | |
| M347 | PIK3R4: phosphoinositide-3-kinase, regulatory | 322 | 323 | 568..4644 |
| | subunit4, p150 | | | |
| M308 | PLA2G2: phospholipase A2, group IIA | 324 | 325 | 136..570 |
| | (platelets, synovial fluid) | | | |
| M383 | PLAB: prostate differentiation factor | 326 | 327 | 26..952 |
| M601 | PLSCR4: phospholipid scramblase 4 | 328 | 329 | 146..1135 |
| M309 | POV1: prostate cancer overexpressed gene 1 | 330 | 331 | 77..1756 |
| M310 | PPIE: peptidyl-prolyl cis-trans isomerase E | 332 | 333 | 12..917 |
| M533 | PPP1R12B: protein phosphatase 1, regulatory | 334 | 335 | 145..3093 |
| | (inhibitor) subunit 12B | | | |
| M311 | PSGR: prostate specific G-protein coupled | 336 | 337 | 1..963 |
| | receptor | | | |
| M384 | PSMA3: proteasome (prosome, macropain) | 338 | 339 | 6..773 |
| | subunit, alpha type, 3 | | | |
| M312 | PTK9: protein tyrosine kinase9 | 340 | 341 | 61..1113 |
| M348 | PTPRT: protein tyrosine phosphatase, receptor | 342 | 343 | 185..4576 |
| | type, T | | | |
| M534 | RAB2L: RAB2, member RAS oncogene family- | 344 | 345 | 134..2467 |
| | like | | | |
| M602 | REG-IV: regenerating gene type IV | 346 | 347 | 182..658 |
| M385 | RLN1: relaxin 1 (H1) | 348 | 349 | 1..558 |
| M313 | RODH: oxidative 3 alpha hydroxysteroid | 350 | 351 | 106..1059 |
| | dehydrogenase, retinol dehydrogenase, 3- | | | |
| | hydroxysteroid epimerase | | | |
| M603 | RPL18A: ribosomal protein L18a | 352 | 353 | 36..566 |
| M314 | SAA1: serum amyloid Al | 354 | 355 | 1..369 |
| M535 | SELE: selectin E (endothelial adhesion | 356 | 357 | 117..1949 |
| | molecule 1) | | | |
| M315 | SEMA3C: sema domain, immunoglobulin | 358 | 359 | 563..2818 |
| | domain (lg), short basic domain, secreted, | | | |
| | (semaphorin) 3C | | | |
| M240 | SERPINA3: serine (or cysteine) proteinase | 360 | 361 | 26..1327 |
| | inhibitor, clade A (alpha-1 antiproteinase, | | | |
| | antitrypsin), member 3 | | | |
| M536 | SGP28: specific granule protein (28 kDa) | 362 | 363 | 16..753 |
| M537 | SIAT4A: sialyltransferase 4A (beta- | 364 | 365 | 1042..2064 |
| | galactosidase alpha-2,3-sialytransferase) | | | |
| M316 | SLC15A2: solute carrier family 15 (H+/peptide | 366 | 367 | 31..2220 |
| | transporter), member 2 | | | |
| M538 | SLC26A2: solute carrier family 26 (sulfate | 368 | 369 | 249..2468 |
| | transporter), member 2 | | | |
| M349 | SLC35A2: solute carrier family 35 (UDP- | 370 | 371 | 324..1505 |
| | galactose transporter), member 2 | | | |
| M317 | SLC4A4: solute carrier family 4, sodium | 372 | 373 | 150..3257 |
| | bicarbonate cotransporter, member 4 | | | |
| M185 | SLPI: secretory leukocyte protease inhibitor | 374 | 375 | 19..417 |
| | (antileukoproteinase) | | | |
| M318 | SMS: spermine synthase | 376 | 377 | 23..1129 |
| M319 | SORD: sorbitol dehydrogenase | 378 | 379 | 142..1215 |
| M539 | SOX4: SRY (sex determining region Y)-box 4 | 380 | 381 | 787..2211 |
| M540 | SPOCK: sparc/osteonectin, cwcv and kazal-like | 382 | 383 | 435..1754 |
| | domains proteoglycan (testican) | | | |
| M320 | SPON2: spondin 2, extracellular matrix protein | 384 | 385 | 276..1271 |
| M423 | SQLE: squalene epoxidase | 386 | 387 | 876..2600 |
| M541 | STAT2: signal transducer and activator of | 388 | 389 | 11..1609 |
| | transcription 2, variant 1 | | | |
| M542 | STAT2: signal transducer and activator of | 390 | 391 | 11..1597 |
| | transcription 2, variant 2 | | | |
| M543 | STAT2: signal transducer and activator of | 392 | 393 | 11..2758 |
| | transcription 2, variant 3 | | | |
| M544 | STAT2: signal transducer and activator of | 394 | 395 | 11..2770 |
| | transcription 2, variant 4 | | | |
| M321 | STEAP: six transmembrane epithelial antigen of | 396 | 397 | 66..1085 |
| | the prostate | | | |
| M545 | STMN1: stathmin 1/oncoprotein 18 | 398 | 399 | 92..541 |
| M378 | SYNPO2: synaptopodin 2 | 400 | 401 | <1..2532 |
| M389 | TACSTD1: tumor-associated calcium signal | 402 | 403 | 179..1123 |
| | transducer 1 | | | |
| M322 | TARP: T-Cell gamma receptor related transcript | 404 | 405 | 74..250 |
| M243 | TFF3: trefoil factor 3 (intestinal) | 406 | 407 | 2..226 |
| M350 | THPO: thrombopoietin (myeloproliferative | 408 | 409 | 216..1277 |
| | leukemia virus oncogene ligand, megakaryocyte | | | |
| | growth and development factor) | | | |
| M323 | TMEFF2: transmembrane protein with EGF-like | 410 | 411 | 395..1519 |
| | and two follistatin-like domains 2 | | | |
| M324 | TMEPAI: PMEPA1 protein (transmembrane, | 412 | 413 | 96..854 |
| | prostate androgen induced) | | | |
| M325 | TMPRSS2: epitheliasin | 414 | 415 | 128..1606 |
| M190 | TPD52: tumor protein D52 | 416 | 417 | 92..646 |
| M326 | TRIP11: thyroid hormone receptor interactor 11 | 418 | 419 | 357..6296 |
| M390 | TRP-P8: transient receptor potential channel | 420 | 421 | 43..3330 |
| | family member | | | |
| M327 | TSPAN-1: Tetraspan NET-1 protein, variant 1 | 422 | 423 | 124..900 |
| M328 | TSPAN-1: Tetraspan NET-1 protein, variant 2 | 424 | 425 | 1..726 |
| M329 | UAP1: UDP-N-acteylglucosamine | 426 | 427 | 1..1518 |
| | pyrophosphorylase 1 | | | |
| M330 | UBE2G2: ubiguitin-conjugating enzyme E2G 2 | 428 | 429 | 56..553 |
| M546 | unnamed gene (1) | 430 | 431 | 551..1532 |
| M547 | unnamed gene (2) | 432 | 433 | 51..1613 |
| M548 | unnamed gene (3) | 434 | 435 | 345..803 |
| M549 | unnamed gene (4) | 436 | 437 | 456..1136 |
| M550 | unnamed gene (5) | 438 | 439 | 871..1546 |
| M551 | unnamed gene (6) | 440 | 441 | 253..1422 |
| M386 | unnamed gene (7) | 442 | 443 | 133..1086 |
| M387 | unnamed gene (8) | 444 | 445 | 290..1108 |
| M388 | unnamed gene (9) | 446 | 447 | 377..946 |
| M382 | unnamed gene (PCA3/DD3-related) | 448 | 449 | 28..312 |
| M331 | XAGE-1: XAGE-1 protein | 450 | 451 | 86..526 |
| M244 | XBP1: X-box binding protein 1 | 452 | 453 | 49..834 |
| M351 | ZNF-313: zinc finger protein 313 | 454 | 455 | 7..693 |

[0065] TABLE 2

| | | SEQ ID | SEQ ID | |
|---|---|---|---|---|
| | | NO | NO | |
| Marker | Gene Name | (nts) | (AAs) | CDS |
| M245 | ABCC4: MRP4, MOATB, ATP-binding cassette, | 1 | 2 | 116..4093 |
| | sub-family C (CFTR/MRP), member 4 | | | |
| M246 | ACAD8: acyl-Coenzyme A dehydrogenase | 3 | 4 | 89..1336 |
| | family, member 8 | | | |
| M361 | ADAM2: disintegrin and metalloproteinase | 5 | 6 | 80...2338 |
| | domain 2, variant 1 | | | |
| M362 | ADAM2: disintegrin and metalloproteinase | 7 | 8 | 179..2386 |
| | domain 2, variant 2 | | | |
| M363 | ADAM2: disintegrin and metalioproteinase | 9 | 10 | 72..2276 |
| | domain 2, variant 3 | | | |
| M247 | ALDH1A3: aldehyde dehydrogenase 1 family, | 13 | 14 | 53..1591 |
| | member A3 | | | |
| M683 | AMACR: alpha-methylacyl-CoA racemase, | 17 | 18 | 90..1238 |
| | variant 1 | | | |
| M684 | AMACR: alpha-methylacyl-CoA racemase, | 19 | 20 | 90..1274 |
| | variant 2 | | | |
| M685 | AMACR: alpha-methylacyl-CoA racemase, | 21 | 22 | 90..686 |
| | variant 3 | | | |
| M686 | AMACR: alpha-methylacyl-CoA racemase, | 23 | 24 | 66..932 |
| | variant 4 | | | |
| M248 | AMACR: alpha-methylacyl-CoA racemase, | 25 | 26 | 90..1238 |
| | variant 5 | | | |
| M249 | AMACR: alpha-methylacyl-CoA racemase, | 27 | 28 | 90..1274 |
| | variant 6 | | | |
| M250 | ANXA3: annexin A3 | 33 | 34 | 47..1018 |
| M251 | ATP6J: ATPase, H+ transporting, lysosomal | 37 | 38 | 52..408 |
| | (vacuolar proton pump), member J | | | |
| M252 | CAMKK2: calcium/calmodulin-dependent | 51 | 52 | 159..1829 |
| | protein kinase kinase 2, beta, variant 1 | | | |
| M253 | CAMKK2: calcium/calmodulin-dependent | 53 | 54 | 1..1254 |
| | protein kinase kinase 2, beta, variant 2 | | | |
| M254 | CGI-96: CGI-96 protein | 61 | 62 | 175..1146 |
| M255 | CHAF1A: chromatin assembly factor 1, subunit | 63 | 64 | 41..2857 |
| | A (p150) | | | |
| M256 | CLCN5: chloride channel 5 (nephrolithiasis 2, X- | 65 | 66 | 292..2532 |
| | linked, Dent disease) | | | |
| M17 | CTGF: connective tissue growth factor | 77 | 78 | 146..1195 |
| M595 | CTNND1: catenin (cadherin-associated protein), | 79 | 80 | 537..3362 |
| | delta 1 | | | |
| M257 | DKFZP564B167: DKFZP564B167 protein, | 87 | 88 | 158..541 |
| | variant 1 | | | |
| M258 | DKFZP566E144: small fragment nuclease | 90 | 91 | 78..791 |
| M259 | EphA3: Ephrin receptor | 96 | 97 | 101..3052 |
| M260 | ERG: v-ets avian erythroblastosis virus E26 | 98 | 99 | 257..1645 |
| | oncogene related transcriptional regulator | | | |
| M261 | FABP5: fatty acid binding protein 5 (psoriasis- | 102 | 103 | 49..456 |
| | associated) | | | |
| M262 | FLJ10369: hypothetical protein FLJ10369 | 104 | 105 | 165..953 |
| M263 | FLJ10816: hypothetical protein FLJ10816, | 106 | 107 | 53..1063 |
| | similar to DNA-directed RNA polymerase I | | | |
| M264 | FLJ14054: hypothetical protein FLJ14054 | 114 | 115 | 328..693 |
| M265 | FLJ23153: hypothetical protein FLJ23153, | 122 | 123 | 104..955 |
| | variant 1 | | | |
| M372 | FLJ23153: hypothetical protein FLJ23153, | 124 | 123 | 104..955 |
| | variant 2 | | | |
| M266 | FMOD: fibromodulin, variant 1 | 127 | 128 | 21..1151 |
| M687 | EMOD: fibromodulin, variant 2 | 129 | 130 | 70..1200 |
| M267 | FOLH1: PSMA, folate hydrolase (prostate- | 131 | 132 | 262..2514 |
| | specific membrane antigen) 1 | | | |
| M213 | FXYD3: FXYD domain-containing ion transport | 139 | 140 | 176..439 |
| | regulator3 , isoform 1 | | | |
| M214 | FXYD3: FXYD domain-containing ion transport | 141 | 142 | 260..601 |
| | regulator 3, isoform 2 | | | |
| M268 | GALNT3: UDP-N-acetyl-alpha-D- | 145 | 146 | 1..1902 |
| | galactosamine, polypeptide N- | | | |
| | acetylgalactosaminyltransferase 3 | | | |
| M269 | GART: phosphoribosylglycinamide | 147 | 148 | 1..3033 |
| | formyltransferase, phosphoribosylglycinamide | | | |
| | synthetase, phosphoribosylaminoimidazole | | | |
| | synthetase | | | |
| M270 | GJB1: gap junction protein, beta 1, 32kD | 149 | 150 | 63..914 |
| | (connexin 32) | | | |
| M271 | GOLPH2: golgi phosphoprotein 2 | 155 | 156 | 151..1353 |
| M272 | GPCR150: putative G protein-coupled receptor | 157 | 158 | 322..1338 |
| M597 | GRIN3A: glutamate receptor, ionotropic, N- | 159 | 160 | 621..3968 |
| | methyl-D-aspartate 3A | | | |
| M199 | HAG-2: anterior gradient 2 (Xenopus aevis) | 165 | 166 | 59..586 |
| | homolog | | | |
| M596 | HARSL: histidyl-tRNA synthetase-like | 167 | 168 | 150..1670 |
| M273 | HMGCS2: 3-hydroxy-3-methylglutaryl- | 173 | 174 | 52..1578 |
| | Coenzyme A synthase 2 (mitochondrial) | | | |
| M274 | HPN: hepsin (transmembrane protease, serine | 177 | 178 | 246..1499 |
| | 1) | | | |
| M275 | HSBP1: heat shock factor binding protein 1 | 179 | 180 | 55..285 |
| M276 | JUNB: jun B proto-oncogene | 187 | 188 | 254..1297 |
| M277 | KCNN4: potassium intermediate/small | 191 | 192 | 397..1680 |
| | conductance calcium-activated channel, | | | |
| | subfamily N, member 4 | | | |
| M278 | KIAA01O6: anti-oxidant protein 2 (non-selenium | 197 | 198 | 44..718 |
| | glutathione peroxidase, acidic calcium- | | | |
| | independent phospholipase A2) | | | |
| M279 | KIAA0872: KIAA0872 protein | 203 | 204 | 35..1678 |
| M280 | KIAA1877: KIAA1877 protein | 207 | 208 | <105..1709 |
| M281 | KLK11: kallikrein 11 | 211 | 212 | 122..874 |
| M282 | KLK2: kallikrein 2, prostatic | 213 | 214 | 1..786 |
| OV37 | LCN2: lipocalin 2 (oncogene 24p3) | 219 | 220 | 1..597 |
| M283 | LIM: LIM protein, variant 1 | 221 | 222 | 121..1911 |
| M284 | LIM: LIM protein, variant 2 | 223 | 222 | 84..1874 |
| M285 | LOC51109: CGI-82 protein, variant 1 | 226 | 227 | 41..997 |
| M286 | LOC51109: CGI-82 protein, variant 2 | 228 | 227 | 41..997 |
| M287 | LOC51137: coat protein gamma-cop | 231 | 232 | 16..2640 |
| M288 | LOC51635: CGI-86 protein | 235 | 236 | 78..1097 |
| M598 | LOC51646: CGI-127 protein | 237 | 238 | 468..833 |
| M289 | LOH11CR2A: loss of heterozygosity, 11, | 241 | 242 | 1054..2367 |
| | chromosomal region 2, gene A | | | |
| M290 | LU: Lutheran blood group (Auberger b antigen | 245 | 246 | 23..1909 |
| | included), B-cell adhesion molecule | | | |
| M599 | MAOA: monoamine oxidase A | 249 | 250 | 45..1628 |
| M291 | MCCC2: Methylcrotonoyl-Coenzyme A | 253 | 254 | 100..1791 |
| | carboxylase 2 (beta) | | | |
| M292 | MDS023: MDS023 protein | 255 | 256 | 336..1019 |
| M293 | MIPEP: mitochondrial intermediate peptidase, | 261 | 262 | 75..2216 |
| | nuclear gene encoding mitochondrial protein | | | |
| M294 | MMP7: matrix metalloproteinase 7 (matrilysin, | 265 | 266 | 48..851 |
| | uterine), PUMP1 proteinase, variant 1 | | | |
| OV52 | MMP7: matrix metalloproteinase 7 (matrilysin, | 267 | 266 | 28..831 |
| | uterine), PUMP1 proteinase, variant 2 | | | |
| M295 | MSMB: microseminoprotein, beta- | 270 | 271 | 33..377 |
| M161 | MYO6: myosin VI | 272 | 273 | 140..3997 |
| M296 | NEDD4L: neural precursor cell expressed, | 274 | 275 | <1..2990 |
| | developmentally down-regulated 4-like, variant | | | |
| | 1 | | | |
| M297 | NEDD4L: neural precursor cell expressed, | 276 | 277 | 378..2942 |
| | developmentally down-regulated 4-like, variant | | | |
| | 2 | | | |
| M298 | NEDD4L: neural precursor cell expressed, | 278 | 279 | <1..2738 |
| | developmentally down-regulated 4-like, variant | | | |
| | 3 | | | |
| M164 | NET-6: tetraspan NET-6 protein | 280 | 281 | 163..777 |
| M299 | NKX3A: NK3 transcription factor homolog A | 282 | 283 | 49..753 |
| | (Drosophila) | | | |
| M300 | NMES1: normal mucosa of esophagus specific | 284 | 285 | 190..441 |
| | 1 | | | |
| M301 | NPY: neuropeptide Y | 288 | 289 | 15..308 |
| M302 | NUCB2: nucleobindin 2 | 292 | 293 | 220..1482 |
| M303 | NUCKS: similar to rat nuclear ubiquitous casein | 294 | 295 | 67..558 |
| | kinase 2 | | | |
| M304 | NUDT4: nudix (nucleoside diphosphate linked | 296 | 297 | 13..555 |
| | moiety X)-type motif 4 | | | |
| M600 | OASIS: old astrocyte specifically induced | 298 | 299 | 104..1663 |
| | substance | | | |
| M305 | ODC1: ornithine decarboxylase 1 | 300 | 301 | 335..1720 |
| M306 | ORM2: orosomucoid 2 | 308 | 309 | 1..606 |
| M379 | OVC10-2: hypothetical protein OVC10-2 | 310 | 311 | 1020..1244 |
| M381 | PCA3: DD3, Prostate Cancer Antigen 3 | 316 | 317 | 401..553 |
| M307 | PEGASUS: Zinc Finger Transcription factor | 320 | 321 | 300..1559 |
| | PEGASUS | | | |
| M308 | PLA2G2: phospholipase A2, group IIA | 324 | 325 | 136..570 |
| | (platelets, synovial fluid) | | | |
| M601 | PLSCR4: phospholipid scramblase 4 | 328 | 329 | 146..1135 |
| M309 | POV1: prostate cancer overexpressed gene 1 | 330 | 331 | 77..1756 |
| M310 | PPIE: peptidyl-prolyl cis-trans isomerase E | 332 | 333 | 12..917 |
| M311 | PSGR: prostate specific G-protein coupled | 336 | 337 | 1..963 |
| | receptor | | | |
| M384 | PSMA3: proteasome (prosome, macropain) | 338 | 339 | 6..773 |
| | subunit, alpha type, 3 | | | |
| M312 | PTK9: protein tyrosine kinase 9 | 340 | 341 | 61..1113 |
| M602 | REG-IV: regenerating gene type IV | 346 | 347 | 182..658 |
| M385 | RLN1: relaxin 1 (H1) | 348 | 349 | 1..558 |
| M313 | RODH: oxidative 3 alpha hydroxysteroid | 350 | 351 | 106..1059 |
| | dehydrogenase, retinol dehydrogenase, 3- | | | |
| | hydroxysteroid epimerase | | | |
| M603 | RPL18A: ribosomal protein L18a | 352 | 353 | 36..566 |
| M314 | SAA1: serum amyloid A1 | 354 | 355 | 1..369 |
| M315 | SEMA3C: sema domain, immunoglobulin | 358 | 359 | 563..2818 |
| | domain (lg), short basic domain, secreted, | | | |
| | (semaphorin) 3C | | | |
| M240 | SERPINA3: serine (or cysteine) proteinase | 360 | 361 | 26..1327 |
| | inhibitor, dade A (alpha-1 antiproteinase, | | | |
| | antitrypsin), member 3 | | | |
| M316 | SLC15A2: solute carrier family 15 (H+/peptide | 366 | 367 | 31..2220 |
| | transporter), member 2 | | | |
| M317 | SLC4A4: solute carrier family 4, sodium | 372 | 373 | 150..3257 |
| | bicarbonate cotransporter, member 4 | | | |
| M185 | SLPI: secretory leukocyte protease inhibitor | 374 | 375 | 19..417 |
| | (antileukoproteinase) | | | |
| M318 | SMS: spermine synthase | 376 | 377 | 23..1129 |
| M319 | SORD: sorbitol dehydrogenase | 378 | 379 | 142..1215 |
| M320 | SPON2: spondin 2, extracellular matrix protein | 384 | 385 | 276..1271 |
| M541 | STAT2: signal transducer and activator of | 388 | 389 | 11..1609 |
| | transcription 2, variant 1 | | | |
| M542 | STAT2: signal transducer and activator of | 390 | 391 | 11..1597 |
| | transcription 2, variant 2 | | | |
| M543 | STAT2: signal transducer and activator of | 392 | 393 | 11..2758 |
| | transcription 2, variant 3 | | | |
| M544 | STAT2: signal transducer and activator of | 394 | 395 | 11..2770 |
| | transcription 2, variant 4 | | | |
| M321 | STEAP: six transmembrane epithelial antigen of | 396 | 397 | 66..1085 |
| | the prostate | | | |
| M389 | TACSTD1: tumor-associated calcium signal | 402 | 403 | 179..1123 |
| | transducer 1 | | | |
| M322 | TARP: T-Cell gamma receptor related transcript | 404 | 405 | 74..250 |
| M243 | TFF3: trefoil factor 3 (intestinal) | 406 | 407 | 2..226 |
| M323 | TMEFF2: transmembrane protein with EGF-like | 410 | 411 | 395..1519 |
| | and two follistatin-like domains 2 | | | |
| M324 | TMEPAI: PMEPA1 protein (transmembrane, | 412 | 413 | 96..854 |
| | prostate androgen induced) | | | |
| M325 | TMPRSS2: epitheliasin | 414 | 415 | 128..1606 |
| M326 | TRIP11: thyroid hormone receptor interactor 11 | 418 | 419 | 357..6296 |
| M390 | TRP-P8: transient receptor potential channel | 420 | 421 | 43..3330 |
| | family member | | | |
| M327 | TSPAN-1: Tetraspan NET-1 protein, variant 1 | 422 | 423 | 124..900 |
| M328 | TSPAN-1: Tetraspan NET-1 protein, variant 2 | 424 | 425 | 1..726 |
| M329 | UAP1: UDP-N-acteylglucosamine | 426 | 427 | 1..1518 |
| | pyrophosphorylase 1 | | | |
| M330 | UBE2G2: ubiguitin-conjugating enzyme E2G 2 | 428 | 429 | 56..553 |
| M546 | unnamed gene (1) | 430 | 431 | 551..1532 |
| M550 | unnamed gene (5) | 438 | 439 | 871..1546 |
| M386 | unnamed gene (7) | 442 | 443 | 133..1086 |
| M387 | unnamed gene (8) | 444 | 445 | 290..1108 |
| M388 | unnamed gene (9) | 446 | 447 | 377..946 |
| M382 | unnamed gene (PCA3/DD3-related) | 448 | 449 | 28..312 |
| M331 | XAGE-1: XAGE-1 protein | 450 | 451 | 86..526 |
| M244 | XBP1: X-box binding protein 1 | 452 | 453 | 49..834 |

[0066] TABLE 3

| | | SEQ | SEQ | |
|---|---|---|---|---|
| | | ID NO | ID NO | |
| Marker | Gene Name | (nts) | (AAs) | CDS |
| M245 | ABCC4: MRP4, MOATB, ATP-binding | 1 | 2 | 116..4093 |
| | cassette, sub-family C (CFTR/MRP), member 4 | | | |
| M246 | ACAD8: acyl-Coenzyme A dehydrogenase | 3 | 4 | 89..1336 |
| | family, member 8 | | | |
| M497 | ALCAM: activated leucocyte cell adhesion | 11 | 12 | 64..1815 |
| | molecule | | | |
| M498 | ALP: alpha-actinin-2-associated LIM protein | 15 | 16 | 71..1165 |
| M683 | AMACR: alpha-methylacyl-CoA racemase, | 17 | 18 | 90..1238 |
| | variant 1 | | | |
| M684 | AMACR: alpha-methylacyl-CoA racemase, | 19 | 20 | 90..1274 |
| | variant 2 | | | |
| M685 | AMACR: alpha-methylacyl-CoA racemase, | 21 | 22 | 90..686 |
| | variant 3 | | | |
| M248 | AMACR: alpha-methylacyl-CoA racemase, | 25 | 26 | 90..1238 |
| | variant 5 | | | |
| M249 | AMACR: alpha-methylacyl-CoA racemase, | 27 | 28 | 90..1274 |
| | variant 6 | | | |
| M365 | AMACR: alpha-methylacyl-CoA racemase, | 29 | 30 | 13..609 |
| | variant 7 | | | |
| M499 | ANPEP: alanyl (membrane) aminopeptidase | 31 | 32 | 121..3024 |
| | (aminopeptidase N, aminopeptidase M, | | | |
| | microsomal aminopeptidase, CD13, p150) | | | |
| M250 | ANXA3: annexin A3 | 33 | 34 | 47..1018 |
| M500 | AR: androgen receptor (dihydrotestosterone | 35 | 36 | 1115..3874 |
| | receptor; testicular feminization; spinal and | | | |
| | bulbar muscular atrophy; Kennedy disease) | | | |
| M501 | AZGP1: alpha-2-glycoprotein 1, zinc, variant 1 | 39 | 40 | 120..1116 |
| M366 | AZGP1: alpha-2-glycoprotein 1, zinc, variant 2 | 41 | 42 | 1..897 |
| M502 | C12orf8: chromosome 12 open reading frame 8 | 43 | 44 | 12..797 |
| M503 | C14orf2: chromosome 14 open reading frame 2 | 45 | 46 | 61..237 |
| M332 | CA4: carbonic anhydrase IV | 47 | 48 | 47..985 |
| M504 | CAGNA1D: calcium channel, voltage- | 49 | 50 | 119..6664 |
| | dependent, L type, alpha 1D subunit | | | |
| M367 | CD24: CD24 antigen (small cell lung carcinoma | 55 | 56 | 57..299 |
| | cluster 4 antigen) | | | |
| M333 | CERD4: cer-d4 (mouse) homolog | 57 | 58 | 14..688 |
| M98 | CGI-52: similar to phosphatidylcholine transfer | 59 | 60 | 277..1356 |
| | protein 2 | | | |
| M505 | CLGN: calmegin | 67 | 68 | 102..1934 |
| M368 | CNN1: calponin 1, basic, smooth muscle | 69 | 70 | 79..972 |
| M506 | COF1: cofilin isoform 1 | 71 | 72 | 153..650 |
| M507 | COPB2: coatomer protein complex, subunit | 73 | 74 | 69..2789 |
| | beta 2 (beta prime) | | | |
| M209 | CTBP2: C-terminal binding protein 2 | 75 | 76 | 137..3094 |
| M508 | CYP27A1: cytochrome P450, subfamily XXVIIA | 81 | 82 | 202..1797 |
| | (steroid 27-hydroxylase, cerebrotendinous | | | |
| | xanthomatosis), polypeptide 1 | | | |
| M509 | CYR61: cysteine-rich, angiogenic inducer, 61 | 83 | 84 | 81..1226 |
| M510 | DKFZp434F054: hypothetical protein | 85 | 86 | 1641..4011 |
| | DKFZp434F054 | | | |
| M257 | DKFZP564B167: DKFZP564B167 protein, | 87 | 88 | 158..541 |
| | variant 1 | | | |
| M511 | DKFZP564B167: DKFZP564B167 protein, | 89 | 88 | 368..751 |
| | variant 2 | | | |
| M258 | DKFZP566E144: small fragment nuclease | 90 | 91 | 78..791 |
| M369 | DMN: desmuslin | 92 | 93 | <1..4126 |
| M370 | EGR1: early growth response 1 | 94 | 95 | 271..1902 |
| M371 | ETR101: immediate early protein | 100 | 101 | 101..772 |
| M261 | FABP5: fatty acid binding protein 5 (psoriasis- | 102 | 103 | 49..456 |
| | associated) | | | |
| M334 | FLJ12752: hypothetical protein FLJ12752 | 108 | 109 | 51..791 |
| M512 | FLJ13409: hypothetical protein FLJ13409, | 110 | 111 | 219..4703 |
| | variant 1 | | | |
| M513 | FLJ13409: hypothetical protein FLJ13409, | 112 | 113 | 219..4589 |
| | variant 2 | | | |
| M514 | FLJ20940: hypothetical protein FLJ20940 | 116 | 117 | 236..742 |
| M335 | FLJ22347: hypothetical protein FLJ22347 | 118 | 119 | 60..2684 |
| M515 | FLJ22684: hypothetical protein FLJ22684 | 120 | 121 | 726..1313 |
| M336 | FLJ23563: hypothetical protein FLJ23563 | 125 | 126 | 135..815 |
| M267 | FOLH1: PSMA, folate hydrolase (prostate- | 131 | 132 | 262..2514 |
| | specific membrane antigen) 1 | | | |
| M516 | FOSB: FBJ murine osteosarcoma viral | 133 | 134 | 594..1610 |
| | oncogene homolog B | | | |
| M517 | FOXD1: forkhead box D1 | 135 | 136 | 413..1810 |
| M373 | FSHPRH1: FSH primary response (LRPR1, | 137 | 138 | 270..2540 |
| | rat) homolog 1 | | | |
| M518 | FZD8: frizzled (Drosophila) homolog 8 | 143 | 144 | 6..2090 |
| M374 | GLUL: glutamate-ammonia ligase (glutamine | 151 | 152 | 123..1244 |
| | synthase), variant 1 | | | |
| M375 | GLUL: glutamate-ammonia ligase (glutamine | 153 | 154 | 431..769 |
| | synthase), variant 2 | | | |
| M271 | GOLPH2: golgi phosphoprotein 2 | 155 | 156 | 151..1353 |
| M220 | GUCY1A3: guanylate cyclase 1, soluble, alpha | 161 | 162 | 520..2592 |
| | 3, variant 1 | | | |
| M221 | GUCY1A3: guanylate cyclase 1, soluble, alpha | 163 | 162 | 386..2458 |
| | 3, variant 2 | | | |
| M222 | GUCY1A3: guanylate cyclase 1, soluble, alpha | 164 | 162 | 407..2479 |
| | 3, variant 3 | | | |
| M519 | HCNGP: transcriptional regulator protein | 169 | 170 | 281..1207 |
| M337 | HIS1: HMBA-inducible | 171 | 172 | 690..1769 |
| M137 | HPGD: hydroxyprostaglandin dehydrogenase | 175 | 176 | 18..818 |
| | 15-(NAD) | | | |
| M338 | HSPC002: HSPC002 protein | 181 | 182 | 24..515 |
| M376 | HSPE1: heat shock 10kD protein 1 (chaperonin | 183 | 184 | 42..350 |
| | 10) | | | |
| M520 | JM27: JM27 protein | 185 | 186 | 64..372 |
| M276 | JUNB: jun Bp roto-oncogene | 187 | 188 | 254..1297 |
| M521 | KCNK1: potassium channel, subfamily K, | 189 | 190 | 183..1193 |
| | member 1 (TWIK-1) | | | |
| M340 | KIAA0026: MORF-related gene X | 193 | 194 | 306..1172 |
| M341 | KIAA0056: KIAA0056 protein | 195 | 196 | <1..4525 |
| M342 | KIAA0435: KIAA0435 gene product | 199 | 200 | 1196..3529 |
| M339 | KIAA0607: neurochondrin | 201 | 202 | <1..2197 |
| M522 | KIAA1497: KIAA1497 protein | 205 | 206 | <3225..5417 |
| M523 | KLF4: Kruppel-like factor 4 (gut) | 209 | 210 | 477..1916 |
| M524 | KRT13: keratin 13 | 215 | 216 | 57..1433 |
| M525 | KRT5: keratin 5 (epidermolysis bullosa simplex, | 217 | 218 | 392..2164 |
| | Dowling-Meara/KobnerlWeber-Cockayne | | | |
| | types) | | | |
| M283 | LIM: LIM protein, variant 1 | 221 | 222 | 121..1911 |
| M284 | LIM: LIM protein, variant 2 | 223 | 222 | 84..1874 |
| M526 | LMOD1: leiomodin 1 (smooth muscle) | 224 | 225 | 213..1931 |
| M285 | LOC51109: CGI-82 protein, variant 1 | 226 | 227 | 41..997 |
| M286 | LOC51109: CGI-82 protein, variant 2 | 228 | 227 | 41..997 |
| M527 | LOC51123: HSPC038 protein | 229 | 230 | 182..412 |
| M528 | LOC51334: mesenchymal stem cell protein | 233 | 234 | 358..1203 |
| | DSC54 | | | |
| M343 | LOC55901: TMTSP for transmembrane | 239 | 240 | 152..2710 |
| | molecule with thrombospondin module | | | |
| M344 | LRP16: LRP16 protein | 243 | 244 | 53..1030 |
| M345 | M160: receptor cysteine-rich type 1 protein | 247 | 248 | 26..4387 |
| | M160 precursor | | | |
| M529 | MAOB: monoamine oxidase B | 251 | 252 | 78..1640 |
| M291 | MCCC2: Methylcrotonoyl-Coenzyme A | 253 | 254 | 100..1791 |
| | carboxylase 2 (beta) | | | |
| OV39 | MEIS1: MEIS1 protein | 257 | 258 | 66..1238 |
| M232 | MGC3077: hypothetical protein MGC3077 | 259 | 260 | 137..703 |
| M293 | MIPEP: mitochondrial intermediate peptidase, | 261 | 262 | 75..2216 |
| | nuclear gene encoding mitochondrial protein | | | |
| M377 | MLLT2: myeloid/lymphoid or mixed-lineage | 263 | 264 | 421..4053 |
| | leukemia (trithorax (Drosophila) homolog): | | | |
| | translocated to, 2 | | | |
| M530 | MS4A1: membrane-spanning 4-domains, | 268 | 269 | 91..984 |
| | subfamily A, member 1 | | | |
| M295 | MSMB: microseminoprotein, beta- | 270 | 271 | 33..377 |
| M161 | MYO6: myosin VI | 272 | 273 | 140..3997 |
| M296 | NEDD4L: neural precursor cell expressed, | 274 | 275 | <1..2990 |
| | developmentally down-regulated 4-like, variant | | | |
| | 1 | | | |
| M297 | NEDD4L: neural precursor cell expressed, | 276 | 277 | 378..2942 |
| | developmentally down-regulated 4-like, variant | | | |
| | 2 | | | |
| M298 | NEDD4L: neural precursor cell expressed, | 278 | 279 | <1..2738 |
| | developmentally down-regulated 4-like, variant | | | |
| | 3 | | | |
| M299 | NKX3A: NK3 transcription factor homolog A | 282 | 283 | 49..753 |
| | (Drosophila) | | | |
| M300 | NMES1: normal mucosa of esophagus specific | 284 | 285 | 190..441 |
| | 1 | | | |
| M55 | NP25: neuronal protein | 286 | 287 | 50..898 |
| M531 | NR4A1: nuclear receptor subfamily 4, group A, | 290 | 291 | 111..1907 |
| | member 1 | | | |
| OV48 | OPN-a: Secreted phosphoprotein-1 | 302 | 303 | 1..942 |
| | (osteopontin, bone sialoprotein) | | | |
| OV49 | OPN-b: Secreted phosphoprotein-1 | 304 | 305 | 88..990 |
| | (osteopontin, bone sialoprotein) | | | |
| OV50 | OPN-c: Secreted phosphoprotein-1 | 306 | 307 | 1..861 |
| | (osteopontin, bone sialoprotein) | | | |
| M346 | p25: brain-specific protein p25 alpha | 312 | 313 | 34..693 |
| M380 | PBK1: PBK1 protein | 314 | 315 | 6..1559 |
| M381 | PCA3: DD3, Prostate Cancer Antigen 3 | 316 | 317 | 401..553 |
| M532 | PCP4: Purkinje cell protein 4 | 318 | 319 | 59..247 |
| M347 | PIK3R4: phosphoinositide-3-kinase, regulatory | 322 | 323 | 568..4644 |
| | subunit 4, p150 | | | |
| M308 | PLA2G2: phospholipase A2, group IIA | 324 | 325 | 136..570 |
| | (platelets, synovial fluid) | | | |
| M383 | PLAB: prostate differentiation factor | 326 | 327 | 26..952 |
| M533 | PPP1R12B: protein phosphatase 1, regulatory | 334 | 335 | 145..3093 |
| | (inhibitor) subunit 12B | | | |
| M348 | PTPRT: protein tyrosine phosphatase, receptor | 342 | 343 | 185..4576 |
| | type, T | | | |
| M534 | RAB2L: RAB2, member RAS oncogene family- | 344 | 345 | 134..2467 |
| | like | | | |
| M314 | SAA1: serum amyloid A1 | 354 | 355 | 1..369 |
| M535 | SELE: selectin E (endothelial adhesion | 356 | 357 | 117..1949 |
| | molecule 1) | | | |
| M536 | SGP28: specific granule protein (28 kDa) | 362 | 363 | 16..753 |
| M537 | SIAT4A: sialyltransferase 4A (beta- | 364 | 365 | 1042..2064 |
| | galactosidase alpha-2,3-sialytransferase) | | | |
| M538 | SLG26A2: solute carrier family 26 (sulfate | 368 | 369 | 249..2468 |
| | transporter), member 2 | | | |
| M349 | SLC35A2: solute carrier family 35 (UDP- | 370 | 371 | 324..1505 |
| | galactose transporter), member 2 | | | |
| M317 | SLC4A4: solute carrier family 4, sodium | 372 | 373 | 150..3257 |
| | bicarbonate cotransporter, member 4 | | | |
| M318 | SMS: spermine synthase | 376 | 377 | 23..1129 |
| M539 | SOX4: SRY (sex determining region Y)-box 4 | 380 | 381 | 787..2211 |
| M540 | SPOCK: sparc/osteonectin, cwcv and kazal-like | 382 | 383 | 435..1754 |
| | domains proteoglycan (testican) | | | |
| M320 | SPON2: spondin 2, extracellular matrix protein | 384 | 385 | 276..1271 |
| M423 | SQLE: squalene epoxidase | 386 | 387 | 876..2600 |
| M545 | STMN1: stathmin 1/oncoprotein 18 | 398 | 399 | 92..541 |
| M378 | SYNPO2: synaptopodin 2 | 400 | 401 | <1..2532 |
| M389 | TAGSTD1: tumor-associated calcium signal | 402 | 403 | 179..1123 |
| | transducer 1 | | | |
| M322 | TARP: T-Cell gamma receptor related | 404 | 405 | 74..250 |
| | transcript | | | |
| M243 | TFF3: trefoil factor 3 (intestinal) | 406 | 407 | 2..226 |
| M350 | THPO: thrombopoletin (myeloproliferative | 408 | 409 | 216..1277 |
| | leukemia virus oncogene ligand, | | | |
| | megakaryocyte growth and development | | | |
| | factor) | | | |
| M190 | TPD52: tumor protein D52 | 416 | 417 | 92..646 |
| M547 | unnamed gene (2) | 432 | 433 | 51..1613 |
| M548 | unnamed gene (3) | 434 | 435 | 345..803 |
| M549 | unnamed gene (4) | 436 | 437 | 456..1136 |
| M551 | unnamed gene (6) | 440 | 441 | 253..1422 |
| M386 | unnamed gene (7) | 442 | 443 | 133..1086 |
| M382 | unnamed gene (PCA3/DD3-related) | 448 | 449 | 28..312 |
| M244 | XBP1: X-box binding protein 1 | 452 | 453 | 49..834 |
| M351 | ZNF313: zinc finger protein 313 | 454 | 455 | 7..693 |

[0067] TABLE 4

| | | SEQ ID | SEQ ID | |
|---|---|---|---|---|
| | | NO | NO | |
| Marker | Gene Name | (nts) | (AAs) | CDS |
| M245 | ABCC4: MRP4, MOATB, ATP-binding | 1 | 2 | 116..4093 |
| | cassette, sub-family C (CFTR/MRP), member 4 | | | |
| M246 | ACAD8: acyl-Coenzyme A dehydrogenase | 3 | 4 | 89..1336 |
| | family, member 8 | | | |
| M683 | AMACR: alpha-methylacyl-CoA racemase, | 17 | 18 | 90..1238 |
| | variant 1 | | | |
| M684 | AMACR: alpha-methylacyl-CoA racemase, | 19 | 20 | 90..1274 |
| | variant 2 | | | |
| M685 | AMACR: alpha-methylacyl-CoA racemase, | 21 | 22 | 90..686 |
| | variant 3 | | | |
| M248 | AMACR: alpha-methylacyl-CoA racemase, | 25 | 26 | 90..1238 |
| | variant 5 | | | |
| M249 | AMACR: alpha-methylacyl-CoA racemase, | 27 | 28 | 90..1274 |
| | variant 6 | | | |
| M250 | ANXA3: annexin A3 | 33 | 34 | 47..1018 |
| M257 | DKFZP564B167: DKFZP564B167 protein, | 87 | 88 | 158..541 |
| | variant 1 | | | |
| M258 | DKFZP566E144: small fragment nuclease | 90 | 91 | 78..791 |
| M261 | FABP5: fatty acid binding protein 5 (psoriasis- | 102 | 103 | 49..456 |
| | associated) | | | |
| M267 | FOLH1: PSMA, folate hydrolase (prostate- | 131 | 132 | 262..2514 |
| | specific membrane antigen) 1 | | | |
| M271 | GOLPH2: golgi phosphoprotein 2 | 155 | 156 | 151..1353 |
| M276 | JUNB: jun B proto-oncogene | 187 | 188 | 254..1297 |
| M283 | LIM: LIM protein, variant 1 | 221 | 222 | 121..1911 |
| M284 | LIM: LIM protein, variant 2 | 223 | 222 | 84..1874 |
| M285 | LOC51109: CGI-82 protein, variant 1 | 226 | 227 | 41..997 |
| M286 | LOC51109: CGI-82 protein, variant 2 | 228 | 227 | 41..997 |
| M291 | MCCC2: Methylcrotonoyl-Coenzyme A | 253 | 254 | 100..1791 |
| | carboxylase 2 (beta) | | | |
| M293 | MIPEP: mitochondrial intermediate peptidase, | 261 | 262 | 75..2216 |
| | nuclear gene encoding mitochondrial protein | | | |
| M295 | MSMB: microseminoprotein, beta- | 270 | 271 | 33..377 |
| M161 | MYO6: myosin VI | 272 | 273 | 140..3997 |
| M296 | NEDD4L: neural precursor cell expressed, | 274 | 275 | <1..2990 |
| | developmentally down-regulated 4-like, variant | | | |
| | 1 | | | |
| M297 | NEDD4L: neural precursor cell expressed, | 276 | 277 | 378..2942 |
| | developmentally down-regulated 4-like, variant | | | |
| | 2 | | | |
| M298 | NEDD4L: neural precursor cell expressed, | 278 | 279 | <1..2738 |
| | developmentally down-regulated 4-like, variant | | | |
| | 3 | | | |
| M299 | NkX3A: NK3 transcription factor homolog A | 282 | 283 | 49..753 |
| | (Drosophila) | | | |
| M300 | NMES1: normal mucosa of esophagus specific | 284 | 285 | 190..441 |
| | 1 | | | |
| M381 | PCA3: DD3, Prostate Cancer Antigen 3 | 316 | 317 | 401..553 |
| M308 | PLA2G2: phospholipase A2, group IIA | 324 | 325 | 136..570 |
| | (platelets, synovial fluid) | | | |
| M314 | SAA1: serum amyloid A1 | 354 | 355 | 1..369 |
| M317 | SLC4A4: solute carrier family 4, sodium | 372 | 373 | 150..3257 |
| | bicarbonate cotransporter, member 4 | | | |
| M318 | SMS: spermine synthase | 376 | 377 | 23..1129 |
| M320 | SPON2: spondin 2, extracellular matrix protein | 384 | 385 | 276..1271 |
| M389 | TAGSTD1: tumor-associated calcium signal | 402 | 403 | 179..1123 |
| | transducer 1 | | | |
| M322 | TARP: T-Cell gamma receptor related | 404 | 405 | 74..250 |
| | transcript | | | |
| M243 | TFF3: trefoil factor 3 (intestinal) | 406 | 407 | 2..226 |
| M386 | unnamed gene (7) | 442 | 443 | 133..1086 |
| M382 | unnamed gene (PCA3/DD3-related) | 448 | 449 | 28..312 |
| M244 | XBP1: X-box binding protein 1 | 452 | 453 | 49..834 |

[0068] TABLE 5

| | | SEQ ID | SEQ ID | |
|---|---|---|---|---|
| | | NO | NO | |
| Marker | Gene Name | nts | AAs | CDS |
| M361 | ADAM2: disintegrin and metalloproteinase | 5 | 6 | 80..2338 |
| | domain 2, variant 1 | | | |
| M362 | ADAM2: disintegrin and metalloproteinase | 7 | 81 | 179..2386 |
| | domain 2, variant 2 | | | |
| M683 | AMACR: alpha-methylacyl-CoA racemase, | 17 | 18 | 90..1238 |
| | variant 1 | | | |
| M684 | AMACR: alpha-methylacyl-CoA racemase, | 19 | 20 | 90..1274 |
| | variant 2 | | | |
| M685 | AMACR: alpha-methylacyl-CoA racemase, | 21 | 22 | 90..686 |
| | variant 3 | | | |
| M248 | AMACR: alpha-methylacyl-CoA racemase, | 25 | 26 | 90..1238 |
| | variant 5 | | | |
| M249 | AMACR: alpha-methylacyl-CoA racemase, | 27 | 28 | 90..1274 |
| | variant 6 | | | |
| M501 | AZGP1: alpha-2-glycoprotein 1, zinc, variant 1 | 39 | 40 | 120..1116 |
| M252 | CAMKK2: calcium/calmodulin-dependent | 51 | 52 | 159..1829 |
| | protein kinase kinase 2, beta, variant 1 | | | |
| M512 | FLJ13409: hypothetical protein FLJ13409, | 110 | 111 | 219..4703 |
| | variant 1 | | | |
| M513 | FLJ13409: hypothetical protein FLJ13409, | 112 | 113 | 219..4589 |
| | variant2 | | | |
| M515 | FLJ22684: hypothetical protein FLJ22684 | 120 | 121 | 726..1313 |
| M336 | FLJ23563: hypothetical protein FLJ23563 | 125 | 126 | 135..815 |
| M687 | FMOD: fibromodulin, variant 2 | 129 | 130 | 70..1200 |
| M597 | GRIN3A: glutamate receptor, ionotropic, N- | 159 | 160 | 621..3968 |
| | methyl-D-aspartate 3A | | | |
| M220 | GUCY1A3: guanylate cyclase 1, soluble, alpha | 161 | 162 | 520..2592 |
| | 3, variant 1 | | | |
| M221 | GUCY1A3: guanylate cyclase 1, soluble, alpha | 163 | 162 | 386..2458 |
| | 3, variant 2 | | | |
| M222 | GUCY1A3: guanylate cyclase 1, soluble, alpha | 164 | 162 | 407..2479 |
| | 3, variant 3 | | | |
| M523 | KLF4: Kruppel-like factor 4 (gut) | 209 | 210 | 477..1916 |
| M298 | NEDD4L: neural precursor cell expressed, | 278 | 279 | <1..2738 |
| | developmentally down-regulated 4-like, variant | | | |
| | 3 | | | |
| M423 | SQLE: squalene epoxidase | 386 | 387 | 876...2600 |
| M541 | STAT2: signal transducer and activator of | 388 | 389 | 11..1609 |
| | transcription 2, variant 1 | | | |
| M542 | STAT2: signal transducer and activator of | 390 | 391 | 11..1597 |
| | transcription 2, variant 2 | | | |
| M543 | STAT2: signal transducer and activator of | 392 | 393 | 11..2758 |
| | transcription 2, variant 3 | | | |
| M544 | STAT2: signal transducer and activator of | 394 | 395 | 11..2770 |
| | transcription 2, variant 4 | | | |
| M378 | SYNPO2: synaptopodin 2 | 400 | 401 | <1..2532 |
| M327 | TSPAN-1: Tetraspan NET-1 protein, variant 1 | 422 | 423 | 124..900 |
| M546 | unnamed gene (1) | 430 | 431 | 551..1532 |
| M547 | unnamed gene (2) | 432 | 433 | 51..1613 |
| M548 | unnamed gene (3) | 434 | 435 | 345..803 |
| M549 | unnamed gene (4) | 436 | 437 | 456..1136 |
| M550 | unnamed gene (5) | 438 | 439 | 871..1546 |
| M551 | unnamed gene (6) | 440 | 441 | 253..1422 |
| M388 | unnamed gene (9) | 446 | 447 | 377..946 |

[0069] TABLE 6

| | | SEQ ID | SEQ ID | |
|---|---|---|---|---|
| | | NO | NO | |
| Marker | Gene Name | (nts) | (AAs) | CDS |
| M245 | ABCC4: MRP4, MOATB, ATP-binding | 1 | 2 | 116..4093 |
| | cassette, sub-family C (CFTR/MRP), member 4 | | | |
| M507 | COPB2: coatomer protein complex, subunit | 73 | 74 | 69..2789 |
| | beta 2 (beta prime) | | | |
| M510 | DKFZp434F054: hypothetical protein | 85 | 86 | 1641..4011 |
| | DKFZp434F054 | | | |
| M511 | DKFZP564B167: DKFZP564B167 protein, | 89 | 88 | 368..751 |
| | variant 2 | | | |
| M372 | FLJ23153: hypothetical protein FLJ23153, | 124 | 123 | 104..955 |
| | variant 2 | | | |
| M519 | HCNGP: transcriptional regulator protein | 169 | 170 | 281..1207 |
| M283 | LIM: LIM protein, variant 1 | 221 | 222 | 121..1911 |
| M285 | LOC51109: CGI-82 protein, variant 1 | 226 | 227 | 41..997 |
| M527 | LOC51123: HSPC038 protein | 229 | 230 | 182..412 |
| M530 | MS4A1: membrane-spanning 4-domains, | 268 | 269 | 91..984 |
| | subfamily A, member 1 | | | |
| M379 | OVC10-2: hypothetical protein OVC10-2 | 310 | 311 | 1020..1244 |
| M346 | p25: brain-specific protein p25 alpha | 312 | 313 | 34..693 |
| M534 | RAB2L: RAB2, member RAS oncogene family- | 344 | 345 | 134..2467 |
| | like | | | |
| M537 | SIAT4A: sialyltransferase 4A (beta- | 364 | 365 | 1042..2064 |
| | galactosidase alpha-2,3-sialytransferase) | | | |
| M538 | SLC26A2: solute carrier family 26 (sulfate | 368 | 369 | 249..2468 |
| | transporter), member 2 | | | |
| M539 | SOX4: SRY (sex determining region Y)-box 4 | 380 | 381 | 787..2211 |
| M540 | SPOCK: sparc/osteonectin, cwcv and kazal- | 382 | 383 | 435..1754 |
| | like domains proteoglycan (testican) | | | |

### Definitions

[0070] As used herein, each of the following terms has the meaning associated with it in this section.

[0071] The articles “a” and “an” are used herein to refer to one or to more than one (i.e. to at least one) of the grammatical object of the article. By way of example, “an element” means one element or more than one element.

[0072] A “marker” is a gene whose altered level of expression in a tissue or cell from its expression level in normal or healthy tissue or cell is associated with a disease state, such as cancer. A “marker nucleic acid” is a nucleic acid (e.g., mRNA, cDNA) encoded by or corresponding to a marker of the invention. Such marker nucleic acids include DNA (e.g., cDNA) comprising the entire or a partial sequence of any of SEQ ID NO (nts) or the complement of such a sequence. The marker nucleic acids also include RNA comprising the entire or a partial sequence of any SEQ ID NO (nts) or the complement of such a sequence, wherein all thymidine residues are replaced with uridine residues. A “marker protein” is a protein encoded by or corresponding to a marker of the invention. A marker protein comprises the entire or a partial sequence of any of the SEQ ID NO (AAs). The terms “protein” and “polypeptide’ are used interchangeably.

[0073] The term “probe” refers to any molecule which is capable of selectively binding to a specifically intended target molecule, for example, a nucleotide transcript or protein encoded by or corresponding to a marker. Probes can be either synthesized by one skilled in the art, or derived from appropriate biological preparations. For purposes of detection of the target molecule, probes may be specifically designed to be labeled, as described herein. Examples of molecules that can be utilized as probes include, but are not limited to, RNA, DNA, proteins, antibodies, and organic molecules.

[0074] A “prostate-associated” body fluid is a fluid which, when in the body of a patient, contacts or passes through prostate cells or into which cells or proteins shed from prostate cells are capable of passing. Exemplary prostate-associated body fluids include blood fluids (e.g. whole blood, blood serum, blood having platelets removed therefrom), lymph, urine, prostatic fluid and semen. Many prostate-associated body fluids (i.e. usually excluding urine) can have prostate cells therein, particularly when the prostate cells are cancerous, and, more particularly, when the prostate cancer is metastasizing. Cell-containing fluids which can contain prostate cancer cells include, but are not limited to, whole blood, blood having platelets removed therefrom, lymph, prostatic fluid, and semen.

[0075] The “normal” level of expression of a marker is the level of expression of the marker in prostate cells of a human subject or patient not afflicted with prostate cancer.

[0076] An “over-expression” or “significantly higher level of expression” of a marker refers to an expression level in a test sample that is greater than the standard error of the assay employed to assess expression, and is preferably at least twice, and more preferably three, four, five or ten times the expression level of the marker in a control sample (e.g., sample from a healthy subject not having the marker associated disease, i.e., prostate cancer) and preferably, the average expression level of the marker in several control samples.

[0077] A “significantly lower level of expression” of a marker refers to an expression level in a test sample that is at least twice, and more preferably three, four, five or ten times lower than the expression level of the marker in a control sample (e.g., sample from a healthy subjects not having the marker associated disease, i.e., prostate cancer) and preferably, the average expression level of the marker in several control samples.

[0078] As used herein, the term “promoter/regulatory sequence” means a nucleic acid sequence which is required for expression of a gene product operably linked to the promoter/regulatory sequence. In some instances, this sequence may be the core promoter sequence and in other instances, this sequence may also include an enhancer sequence and other regulatory elements which are required for expression of the gene product. The promoter/regulatory sequence may, for example, be one which expresses the gene product in a tissue-specific manner.

[0079] A “constitutive” promoter is a nucleotide sequence which, when operably linked with a polynucleotide which encodes or specifies a gene product, causes the gene product to be produced in a living human cell under most or all physiological conditions of the cell.

[0080] An “inducible” promoter is a nucleotide sequence which, when operably linked with a polynucleotide which encodes or specifies a gene product, causes the gene product to be produced in a living human cell substantially only when an inducer which corresponds to the promoter is present in the cell.

[0081] A “tissue-specific” promoter is a nucleotide sequence which, when operably linked with a polynucleotide which encodes or specifies a gene product, causes the gene product to be produced in a living human cell substantially only if the cell is a cell of the tissue type corresponding to the promoter.

[0082] A “transcribed polynucleotide” or “nucleotide transcript” is a polynucleotide (e.g. an mRNA, hnRNA, a cDNA, or an analog of such RNA or cDNA) which is complementary to or homologous with all or a portion of a mature mRNA made by transcription of a marker of the invention and normal post-transcriptional processing (e.g. splicing), if any, of the RNA transcript, and reverse transcription of the RNA transcript.

[0083] “Complementary” refers to the broad concept of sequence complementarity between regions of two nucleic acid strands or between two regions of the same nucleic acid strand. It is known that an adenine residue of a first nucleic acid region is capable of forming specific hydrogen bonds (“base pairing”) with a residue of a second nucleic acid region which is antiparallel to the first region if the residue is thymine or uracil. Similarly, it is known that a cytosine residue of a first nucleic acid strand is capable of base pairing with a residue of a second nucleic acid strand which is antiparallel to the first strand if the residue is guanine. A first region of a nucleic acid is complementary to a second region of the same or a different nucleic acid if, when the two regions are arranged in an antiparallel fashion, at least one nucleotide residue of the first region is capable of base pairing with a residue of the second region. Preferably, the first region comprises a first portion and the second region comprises a second portion, whereby, when the first and second portions are arranged in an antiparallel fashion, at least about 50%, and preferably at least about 75%, at least about 90%, or at least about 95% of the nucleotide residues of the first portion are capable of base pairing with nucleotide residues in the second portion. More preferably, all nucleotide residues of the first portion are capable of base pairing with nucleotide residues in the second portion.

[0084] “Homologous” as used herein, refers to nucleotide sequence similarity between two regions of the same nucleic acid strand or between regions of two different nucleic acid strands. When a nucleotide residue position in both regions is occupied by the same nucleotide residue, then the regions are homologous at that position. A first region is homologous to a second region if at least one nucleotide residue position of each region is occupied by the same residue. Homology between two regions is expressed in terms of the proportion of nucleotide residue positions of the two regions that are occupied by the same nucleotide residue. By way of example, a region having the nucleotide sequence 5′-ATTGCC-3′ and a region having the nucleotide sequence 5′-TATGGC-3′ share 50% homology. Preferably, the first region comprises a first portion and the second region comprises a second portion, whereby, at least about 50%, and preferably at least about 75%, at least about 90%, or at least about 95% of the nucleotide residue positions of each of the portions are occupied by the same nucleotide residue. More preferably, all nucleotide residue positions of each of the portions are occupied by the same nucleotide residue.

[0085] A molecule is “fixed” or “affixed” to a substrate if it is covalently or non-covalently associated with the substrate such the substrate can be rinsed with a fluid (e.g. standard saline citrate, pH 7.4) without a substantial fraction of the molecule dissociating from the substrate.

[0086] As used herein, a “naturally-occurring” nucleic acid molecule refers to an RNA or DNA molecule having a nucleotide sequence that occurs in an organism found in nature.

[0087] A cancer is “inhibited” if at least one symptom of the cancer is alleviated, terminated, slowed, or prevented. As used herein, prostate cancer is also “inhibited” if recurrence or metastasis of the cancer is reduced, slowed, delayed, or prevented.

[0088] A kit is any manufacture (e.g. a package or container) comprising at least one reagent, e.g. a probe, for specifically detecting the expression of a marker of the invention. The kit may be promoted, distributed, or sold as a unit for performing the methods of the present invention.

[0089] “Proteins of the invention” encompass marker proteins and their fragments; variant marker proteins and their fragments; peptides and polypeptides comprising an at least 15 amino acid segment of a marker or variant marker protein; and fusion proteins comprising a marker or variant marker protein, or an at least 15 amino acid segment of a marker or variant marker protein.

[0090] Unless otherwise specified herewithin, the terms “antibody” and “antibodies” broadly encompass naturally-occurring forms of antibodies (e.g., IgG, IgA, IgM, IgE) and recombinant antibodies such as single-chain antibodies, chimeric and humanized antibodies and multi-specific antibodies, as well as fragments and derivatives of all of the foregoing, which fragments and derivatives have at least an antigenic binding site. Antibody derivatives may comprise a protein or chemical moiety conjugated to an antibody.

### Description

[0091] The present invention is based, in part, on newly identified markers which are over-expressed in prostate cancer cells as compared to their expression in normal (i.e. non-cancerous) prostate cells. The enhanced expression of one or more of these markers in prostate cells is herein correlated with the cancerous state of the tissue. The invention provides compositions, kits, and methods for assessing the cancerous state of prostate cells (e.g. cells obtained from a human, cultured human cells, archived or preserved human cells and in vivo cells) as well as treating patients afflicted with prostate cancer.

[0092] The compositions, kits, and methods of the invention have the following uses, among others:

[0093] 1) assessing whether a patient is afflicted with prostate cancer;

[0094] 2) assessing the metastatic potential of prostate cancer in a human patient;

[0095] 3) making antibodies, antibody fragments or antibody derivatives that are useful for treating prostate cancer and/or assessing whether a patient is afflicted with prostate cancer;

[0096] 4) assessing the presence of prostate cancer cells;

[0097] 5) assessing the efficacy of one or more test compounds for inhibiting prostate cancer in a patient;

[0098] 6) assessing the efficacy of a therapy for inhibiting prostate cancer in a patient;

[0099] 7) monitoring the progression of prostate cancer in a patient;

[0100] 8) selecting a composition or therapy for inhibiting prostate cancer in a patient;

[0101] 9) treating a patient afflicted with prostate cancer;

[0102] 10) inhibiting prostate cancer in a patient;

[0103] 11) assessing the prostate carcinogenic potential of a test compound; and

[0104] 12) preventing the onset of prostate cancer in a patient at risk for developing prostate cancer.

[0105] The invention thus includes a method of assessing whether a patient is afflicted with prostate cancer which includes assessing whether the patient has pre-metastasized prostate cancer. This method comprises comparing the level of expression of a marker of the invention in a patient sample and the normal level of expression of the marker in a control, e.g., a non-prostate cancer sample. A significantly higher level of expression of the marker in the patient sample as compared to the normal level is an indication that the patient is afflicted with prostate cancer. In a preferred embodiment, the marker is selected from the markers in Table 3.

[0106] Gene delivery vehicles, host cells and compositions (all described herein) containing nucleic acids comprising the entirety, or a segment of 15 or more nucleotides, of any of the sequences of the SEQ ID NO (nts) or the complement of such sequences, and polypeptides comprising the entirety, or a segment of 10 or more amino acids, of any of the sequences of the SEQ ID NO (AAs) are also provided by this invention.

[0107] As described herein, prostate cancer in patients is associated with an increased level of expression of one or more markers of the invention. While, as discussed above, some of these changes in expression level result from occurrence of the prostate cancer, others of these changes induce, maintain, and promote the cancerous state of prostate cancer cells. Thus, prostate cancer characterized by an increase in the level of expression of one or more markers of the invention can be inhibited by reducing and/or interfering with the expression of the markers and/or function of the proteins encoded by those markers.

[0108] Expression of a marker of the invention can be inhibited in a number of ways generally known in the art. For example, an antisense oligonucleotide can be provided to the prostate cancer cells in order to inhibit transcription, translation, or both, of the marker(s). Alternately, a polynucleotide encoding an antibody, an antibody derivative, or an antibody fragment which specifically binds a marker protein, and operably linked with an appropriate promoter/regulator region, can be provided to the cell in order to generate intracellular antibodies which will inhibit the function or activity of the protein. The expression and/or function of a marker may also be inhibited by treating the prostate cancer cell with an antibody, antibody derivative or antibody fragment that specifically binds a marker protein. Using the methods described herein, a variety of molecules, particularly including molecules sufficiently small that they are able to cross the cell membrane, can be screened in order to identify molecules which inhibit expression of a marker or inhibit the function of a marker protein. The compound so identified can be provided to the patient in order to inhibit prostate cancer cells of the patient.

[0109] Any marker or combination of markers of the invention, as well as any known markers in combination with the markers of the invention, may be used in the compositions, kits, and methods of the present invention. In general, it is preferable to use markers for which the difference between the level of expression of the marker in prostate cancer cells and the level of expression of the same marker in normal prostate cells is as great as possible. Although this difference can be as small as the limit of detection of the method for assessing expression of the marker, it is preferred that the difference be at least greater than the standard error of the assessment method, and preferably a difference of at least 2-, 3-, 4-, 5-, 6-, 7-, 8-, 9-, 10-, 15-, 20-, 25-, 100-, 500-, 1000-fold or greater than the level of expression of the same marker in normal prostate tissue.

[0110] It is recognized that certain marker proteins are secreted from prostate cells (i.e. one or both of normal and cancerous cells) to the extracellular space surrounding the cells. These markers are preferably used in certain embodiments of the compositions, kits, and methods of the invention, owing to the fact that the such marker proteins can be detected in a prostate-associated body fluid sample, which may be more easily collected from a human patient than a tissue biopsy sample. In addition, preferred in vivo techniques for detection of a marker protein include introducing into a subject a labeled antibody directed against the protein. For example, the antibody can be labeled with a radioactive marker whose presence and location in a subject can be detected by standard imaging techniques.

[0111] It is a simple matter for the skilled artisan to determine whether any particular marker protein is a secreted protein. In order to make this determination, the marker protein is expressed in, for example, a mammalian cell, preferably a human prostate cell line, extracellular fluid is collected, and the presence or absence of the protein in the extracellular fluid is assessed (e.g. using a labeled antibody which binds specifically with the protein).

[0112] The following is an example of a method which can be used to detect secretion of a protein. About 8×10⁵ 293T cells are incubated at 37° C. in wells containing growth medium (Dulbecco's modified Eagle's medium {DMEM} supplemented with 10% fetal bovine serum) under a 5% (v/v) CO₂, 95% air atmosphere to about 60-70% confluence. The cells are then transfected using a standard transfection mixture comprising 2 micrograms of DNA comprising an expression vector encoding the protein and 10 microliters of LipofectAMINE™ (GIBCO/BRL Catalog no. 18342-012) per well. The transfection mixture is maintained for about 5 hours, and then replaced with fresh growth medium and maintained in an air atmosphere. Each well is gently rinsed twice with DMEM which does not contain methionine or cysteine (DMEM-MC; ICN Catalog no. 16-424- 54). About 1 milliliter of DMEM-MC and about 50 microcuries of Trans-³⁵S™ reagent (ICN Catalog no. 51006) are added to each well. The wells are maintained under the 5% CO₂ atmosphere described above and incubated at 37° C. for a selected period. Following incubation, 150 microliters of conditioned medium is removed and centrifuged to remove floating cells and debris. The presence of the protein in the supernatant is an indication that the protein is secreted.

[0113] It will be appreciated that patient samples containing prostate cells may be used in the methods of the present invention. In these embodiments, the level of expression of the marker can be assessed by assessing the amount (e.g. absolute amount or concentration) of the marker in a prostate cell sample, e.g., a prostate tissue biopsy obtained from a patient. The cell sample can, of course, be subjected to a variety of well-known post-collection preparative and storage techniques (e.g., nucleic acid and/or protein extraction, fixation, storage, freezing, ultrafiltration, concentration, evaporation, centrifugation, etc.) prior to assessing the amount of the marker in the sample. Likewise, prostate tissue biopsies may also be subjected to post-collection preparative and storage techniques, e.g., fixation.

[0114] The compositions, kits, and methods of the invention can be used to detect expression of marker proteins having at least one portion which is displayed on the surface of cells which express it. It is a simple matter for the skilled artisan to determine whether a marker protein, or a portion thereof, is exposed on the cell surface. For example, immunological methods may be used to detect such proteins on whole cells, or well known computer-based sequence analysis methods may be used to predict the presence of at least one extracellular domain (i.e. including both secreted proteins and proteins having at least one cell-surface domain). Expression of a marker protein having at least one portion which is displayed on the surface of a cell which expresses it may be detected without necessarily lysing the cell (e.g. using a labeled antibody which binds specifically with a cell-surface domain of the protein).

[0115] Expression of a marker of the invention may be assessed by any of a wide variety of well known methods for detecting expression of a transcribed nucleic acid or protein. Non-limiting examples of such methods include immunological methods for detection of secreted, cell-surface, cytoplasmic, or nuclear proteins, protein purification methods, protein function or activity assays, nucleic acid hybridization methods, nucleic acid reverse transcription methods, and nucleic acid amplification methods.

[0116] In a preferred embodiment, expression of a marker is assessed using an antibody (e.g. a radio-labeled, chromophore-labeled, fluorophore-labeled, or enzyme-labeled antibody), an antibody derivative (e.g. an antibody conjugated with a substrate or with the protein or ligand of a protein-ligand pair {e.g. biotin-streptavidin} ), or an antibody fragment (e.g. a single-chain antibody, an isolated antibody hypervariable domain, etc.) which binds specifically with a marker protein or fragment thereof, including a marker protein which has undergone all or a portion of its normal post-translational modification.

[0117] In another preferred embodiment, expression of a marker is assessed by preparing mRNA/cDNA (i.e. a transcribed polynucleotide) from cells in a patient sample, and by hybridizing the mRNA/cDNA with a reference polynucleotide which is a complement of a marker nucleic acid, or a fragment thereof. cDNA can, optionally, be amplified using any of a variety of polymerase chain reaction methods prior to hybridization with the reference polynucleotide; preferably, it is not amplified. Expression of one or more markers can likewise be detected using quantitative PCR to assess the level of expression of the marker(s). Alternatively, any of the many known methods of detecting mutations or variants (e.g. single nucleotide polymorphisms, deletions, etc.) of a marker of the invention may be used to detect occurrence of a marker in a patient.

[0118] In a related embodiment, a mixture of transcribed polynucleotides obtained from the sample is contacted with a substrate having fixed thereto a polynucleotide complementary to or homologous with at least a portion (e.g. at least 7, 10, 15, 20, 25, 30, 40, 50, 100, 500, or more nucleotide residues) of a marker nucleic acid. If polynucleotides complementary to or homologous with are differentially detectable on the substrate (e.g. detectable using different chromophores or fluorophores, or fixed to different selected positions), then the levels of expression of a plurality of markers can be assessed simultaneously using a single substrate (e.g. a “gene chip” microarray of polynucleotides fixed at selected positions). When a method of assessing marker expression is used which involves hybridization of one nucleic acid with another, it is preferred that the hybridization be performed under stringent hybridization conditions.

[0119] Because the compositions, kits, and methods of the invention rely on detection of a difference in expression levels of one or more markers of the invention, it is preferable that the level of expression of the marker is significantly greater than the minimum detection limit of the method used to assess expression in at least one of normal prostate cells and cancerous prostate cells.

[0120] It is understood that by routine screening of additional patient samples using one or more of the markers of the invention, it will be realized that certain of the markers are over-expressed in cancers of various types, including specific prostate cancers, as well as other cancers. For example, it will be confirmed that some of the markers of the invention are over-expressed in most (i.e. 50% or more) or substantially all (i.e. 80% or more) of prostate cancer. Furthermore, it will be confirmed that certain of the markers of the invention are associated with prostate cancer of various stages. The TNM staging approach assigns the primary tumor (T) to one of four stages (and to additional substages within these categories) based on the size and location of the primary tumor within the prostate. A T1 designation indicates a microscopic tumor which cannot be detected by a digital rectal exam. A T2NO designation refers to a tumor palpable upon a digital rectal exam but are contained within the prostate capsule (local disease). In all forms of stage T3 disease the tumors have extended through the prostate capsule into the surrounding connective tissue or seminal vesicles. The T4 designation refers to tumors that have escaped from the prostate and can be found in the pelvic region. The N stage refers to whether the primary tumor has spread to the regional lymph nodes (pelvic lymph nodes). The M stage refers to whether the tumor cells have metastasized to distant sites.

[0121] In addition, as a greater number of patient samples are assessed for expression of the markers of the invention and the outcomes of the individual patients from whom the samples were obtained are correlated, it will also be confirmed that altered expression of certain of the markers of the invention are strongly correlated with malignant cancers and that altered expression of other markers of the invention are strongly correlated with benign tumors. The compositions, kits, and methods of the invention are thus useful for characterizing one or more of the stage, grade, histological type, and benign/malignant nature of prostate cancer in patients.

[0122] When the compositions, kits, and methods of the invention are used for characterizing one or more of the stage, grade, histological type, and benign/malignant nature of prostate cancer in a patient, it is preferred that the marker or panel of markers of the invention is selected such that a positive result is obtained in at least about 20%, and preferably at least about 40%, 60%, or 80%, and more preferably in substantially all patients afflicted with a prostate cancer of the corresponding stage, grade, histological type, or benign/malignant nature. Preferably, the marker or panel of markers of the invention is selected such that a positive predictive value (PPV) of greater than about 10% is obtained for the general population (more preferably coupled with an assay specificity greater than 80%).

[0123] When a plurality of markers of the invention are used in the compositions, kits, and methods of the invention, the level of expression of each marker in a patient sample can be compared with the normal level of expression of each of the plurality of markers in non-cancerous samples of the same type, either in a single reaction mixture (i.e. using reagents, such as different fluorescent probes, for each marker) or in individual reaction mixtures corresponding to one or more of the markers. In one embodiment, a significantly increased level of expression of more than one of the plurality of markers in the sample, relative to the corresponding normal levels, is an indication that the patient is afflicted with prostate cancer. When a plurality of markers is used, it is preferred that 2, 3, 4, 5, 8, 10, 12, 15, 20, 30, or 50 or more individual markers be used, wherein fewer markers are preferred.

[0124] In order to maximize the sensitivity of the compositions, kits, and methods of the invention (i.e. by interference attributable to cells of non-prostate origin in a patient sample), it is preferable that the marker of the invention used therein be a marker which has a restricted tissue distribution, e.g., normally not expressed in a non-prostate tissue.

[0125] Only a small number of markers are known to be associated with prostate cancers (e.g. prostate specific antigen (PSA, KLK3), prostate specific membrane antigen (PSMA FOLH1), prostrate acid phosphatase (PAP, ACPP), prostate cancer antigen 3 (PCA3, DD3), prostate carcinoma tumor antigen (PCTA-1 LGALS8), prostate stem cell antigen (PSCA), glandular kallikrein-1 (hGK-1, KLK2), prostase (KLK4, PRSS17, KLK-L1), prostate specific G-protein coupled receptor (PSGR), and the six transmembrane epithelial antigen of the prostate (STEAP, PRSS24)). In one embodiment, these markers may be used together with one or more markers of the invention in a panel of markers. It is well known that certain types of genes, such as oncogenes, tumor suppressor genes, growth factor-like genes, protease-like genes, and protein kinase-like genes are often involved with development of cancers of various types. Thus, among the markers of the invention, use of those which correspond to proteins which resemble known proteins encoded by known oncogenes and tumor suppressor genes, and those which correspond to proteins which resemble growth factors, proteases, and protein kinases are preferred.

[0126] It is recognized that the compositions, kits, and methods of the invention will be of particular utility to patients having an enhanced risk of developing prostate cancer and their medical advisors. Patients recognized as having an enhanced risk of developing prostate cancer include, for example, patients having a familial history of prostate cancer, patients identified as having a mutant oncogene (i.e. at least one allele), and patients of advancing age (i.e. men older than about 50 or 60 years).

[0127] The level of expression of a marker in normal (i.e. non-cancerous) human prostate tissue can be assessed in a variety of ways. In one embodiment, this normal level of expression is assessed by assessing the level of expression of the marker in a portion of prostate cells which appears to be non-cancerous and by comparing this normal level of expression with the level of expression in a portion of the prostate cells which is suspected of being cancerous. Alternately, and particularly as further information becomes available as a result of routine performance of the methods described herein, population-average values for normal expression of the markers of the invention may be used. In other embodiments, the ‘normal’ level of expression of a marker may be determined by assessing expression of the marker in a patient sample obtained from a non-cancer-afflicted patient, from a patient sample obtained from a patient before the suspected onset of prostate cancer in the patient, from archived patient samples, and the like.

[0128] The invention includes compositions, kits, and methods for assessing the presence of prostate cancer cells in a sample (e.g. an archived tissue sample or a sample obtained from a patient). These compositions, kits, and methods are substantially the same as those described above, except that, where necessary, the compositions, kits, and methods are adapted for use with samples other than patient samples. For example, when the sample to be used is a parafinized, archived human tissue sample, it can be necessary to adjust the ratio of compounds in the compositions of the invention, in the kits of the invention, or the methods used to assess levels of marker expression in the sample. Such methods are well known in the art and within the skill of the ordinary artisan.

[0129] The invention includes a kit for assessing the presence of prostate cancer cells (e.g. in a sample such as a patient sample). The kit comprises a plurality of reagents, each of which is capable of binding specifically with a marker nucleic acid or protein. Suitable reagents for binding with a marker protein include antibodies, antibody derivatives, antibody fragments, and the like. Suitable reagents for binding with a marker nucleic acid (e.g. a genomic DNA, an mRNA, a spliced mRNA, a cDNA, or the like) include complementary nucleic acids. For example, the nucleic acid reagents may include oligonucleotides (labeled or non-labeled) fixed to a substrate, labeled oligonucleotides not bound with a substrate, pairs of PCR primers, molecular beacon probes, and the like.

[0130] The kit of the invention may optionally comprise additional components useful for performing the methods of the invention. By way of example, the kit may comprise fluids (e.g. SSC buffer) suitable for annealing complementary nucleic acids or for binding an antibody with a protein with which it specifically binds, one or more sample compartments, an instructional material which describes performance of a method of the invention, a sample of normal prostate cells, a sample of prostate cancer cells, and the like.

[0131] The invention also includes a method of making an isolated hybridoma which produces an antibody useful for assessing whether patient is afflicted with an prostate cancer. In this method, a protein or peptide comprising the entirety or a segment of a marker protein is synthesized or isolated (e.g. by purification from a cell in which it is expressed or by transcription and translation of a nucleic acid encoding the protein or peptide in vivo or in vitro using known methods). A vertebrate, preferably a mammal such as a mouse, rat, rabbit, or sheep, is immunized using the protein or peptide. The vertebrate may optionally (and preferably) be immunized at least one additional time with the protein or peptide, so that the vertebrate exhibits a robust immune response to the protein or peptide. Splenocytes are isolated from the immunized vertebrate and fused with an immortalized cell line to form hybridomas, using any of a variety of methods well known in the art. Hybridomas formed in this manner are then screened using standard methods to identify one or more hybridomas which produce an antibody which specifically binds with the marker protein or a fragment thereof. The invention also includes hybridomas made by this method and antibodies made using such hybridomas.

[0132] The invention also includes a method of assessing the efficacy of a test compound for inhibiting prostate cancer cells. As described above, differences in the level of expression of the markers of the invention correlate with the cancerous state of prostate cells. Although it is recognized that changes in the levels of expression of certain of the markers of the invention likely result from the cancerous state of prostate cells, it is likewise recognized that changes in the levels of expression of other of the markers of the invention induce, maintain, and promote the cancerous state of those cells. Thus, compounds which inhibit a prostate cancer in a patient will cause the level of expression of one or more of the markers of the invention to change to a level nearer the normal level of expression for that marker (i.e. the level of expression for the marker in non-cancerous prostate cells).

[0133] This method thus comprises comparing expression of a marker in a first prostate cell sample and maintained in the presence of the test compound and expression of the marker in a second prostate cell sample and maintained in the absence of the test compound. A significantly reduced expression of a marker of the invention in the presence of the test compound is an indication that the test compound inhibits prostate cancer. The prostate cell samples may, for example, be aliquots of a single sample of normal prostate cells obtained from a patient, pooled samples of normal prostate cells obtained from a patient, cells of a normal prostate cell line, aliquots of a single sample of prostate cancer cells obtained from a patient, pooled samples of prostate cancer cells obtained from a patient, cells of a prostate cancer cell line, or the like. In one embodiment, the samples are prostate cancer cells obtained from a patient and a plurality of compounds known to be effective for inhibiting various prostate cancers are tested in order to identify the compound which is likely to best inhibit the prostate cancer in the patient.

[0134] This method may likewise be used to assess the efficacy of a therapy for inhibiting prostate cancer in a patient. In this method, the level of expression of one or more markers of the invention in a pair of samples (one subjected to the therapy, the other not subjected to the therapy) is assessed. As with the method of assessing the efficacy of test compounds, if the therapy induces a significantly lower level of expression of a marker of the invention then the therapy is efficacious for inhibiting prostate cancer. As above, if samples from a selected patient are used in this method, then alternative therapies can be assessed in vitro in order to select a therapy most likely to be efficacious for inhibiting prostate cancer in the patient.

[0135] As described above, the cancerous state of human prostate cells is correlated with changes in the levels of expression of the markers of the invention. The invention includes a method for assessing the human prostate cell carcinogenic potential of a test compound. This method comprises maintaining separate aliquots of human prostate cells in the presence and absence of the test compound. Expression of a marker of the invention in each of the aliquots is compared. A significantly higher level of expression of a marker of the invention in the aliquot maintained in the presence of the test compound (relative to the aliquot maintained in the absence of the test compound) is an indication that the test compound possesses human prostate cell carcinogenic potential. The relative carcinogenic potentials of various test compounds can be assessed by comparing the degree of enhancement or inhibition of the level of expression of the relevant markers, by comparing the number of markers for which the level of expression is enhanced or inhibited, or by comparing both.

[0136] Various aspects of the invention are described in further detail in the following subsections.

### I. Isolated Nucleic Acid Molecules

[0137] One aspect of the invention pertains to isolated nucleic acid molecules, including nucleic acids which encode a marker protein or a portion thereof. Isolated nucleic acids of the invention also include nucleic acid molecules sufficient for use as hybridization probes to identify marker nucleic acid molecules, and fragments of marker nucleic acid molecules, e.g., those suitable for use as PCR primers for the amplification or mutation of marker nucleic acid molecules. As used herein, the term “nucleic acid molecule” is intended to include DNA molecules (e.g., cDNA or genomic DNA) and RNA molecules (e.g., mRNA) and analogs of the DNA or RNA generated using nucleotide analogs. The nucleic acid molecule can be single-stranded or double-stranded, but preferably is double-stranded DNA.

[0138] An “isolated” nucleic acid molecule is one which is separated from other nucleic acid molecules which are present in the natural source of the nucleic acid molecule. In one embodiment, an “isolated” nucleic acid molecule is free of sequences (preferably protein-encoding sequences) which naturally flank the nucleic acid (i.e., sequences located at the 5′ and 3′ ends of the nucleic acid) in the genomic DNA of the organism from which the nucleic acid is derived. For example, in various embodiments, the isolated nucleic acid molecule can contain less than about 5 kB, 4 kB, 3 kB, 2 kB, 1 kB, 0.5 kB or 0.1 kB of nucleotide sequences which naturally flank the nucleic acid molecule in genomic DNA of the cell from which the nucleic acid is derived. In another embodiment, an “isolated” nucleic acid molecule, such as a cDNA molecule, can be substantially free of other cellular material, or culture medium when produced by recombinant techniques, or substantially free of chemical precursors or other chemicals when chemically synthesized. A nucleic acid molecule that is substantially free of cellular material includes preparations having less than about 30%, 20%, 10%, or 5% of heterologous nucleic acid (also referred to herein as a “contaminating nucleic acid”).

[0139] A nucleic acid molecule of the present invention can be isolated using standard molecular biology techniques and the sequence information in the database records described herein. Using all or a portion of such nucleic acid sequences, nucleic acid molecules of the invention can be isolated using standard hybridization and cloning techniques (e.g., as described in Sambrook et al., ed., Molecular Cloning: A Laboratory Manual, 2nd ed., Cold Spring Harbor Laboratory Press, Cold Spring Harbor, N.Y., 1989).

[0140] A nucleic acid molecule of the invention can be amplified using cDNA, mRNA, or genomic DNA as a template and appropriate oligonucleotide primers according to standard PCR amplification techniques. The nucleic acid so amplified can be cloned into an appropriate vector and characterized by DNA sequence analysis. Furthermore, nucleotides corresponding to all or a portion of a nucleic acid molecule of the invention can be prepared by standard synthetic techniques, e.g., using an automated DNA synthesizer.

[0141] In another preferred embodiment, an isolated nucleic acid molecule of the invention comprises a nucleic acid molecule which has a nucleotide sequence complementary to the nucleotide sequence of a marker nucleic acid or to the nucleotide sequence of a nucleic acid encoding a marker protein. A nucleic acid molecule which is complementary to a given nucleotide sequence is one which is sufficiently complementary to the given nucleotide sequence that it can hybridize to the given nucleotide sequence thereby forming a stable duplex.

[0142] Moreover, a nucleic acid molecule of the invention can comprise only a portion of a nucleic acid sequence, wherein the full length nucleic acid sequence comprises a marker nucleic acid or which encodes a marker protein. Such nucleic acids can be used, for example, as a probe or primer. The probe/primer typically is used as one or more substantially purified oligonucleotides. The oligonucleotide typically comprises a region of nucleotide sequence that hybridizes under stringent conditions to at least about 7, preferably about 15, more preferably about 25, 50, 75, 100, 125, 150, 175, 200, 250, 300, 350, or 400 or more consecutive nucleotides of a nucleic acid of the invention.

[0143] Probes based on the sequence of a nucleic acid molecule of the invention can be used to detect transcripts or genomic sequences corresponding to one or more markers of the invention. The probe comprises a label group attached thereto, e.g., a radioisotope, a fluorescent compound, an enzyme, or an enzyme co-factor. Such probes can be used as part of a diagnostic test kit for identifying cells or tissues which mis-express the protein, such as by measuring levels of a nucleic acid molecule encoding the protein in a sample of cells from a subject, e.g., detecting mRNA levels or determining whether a gene encoding the protein has been mutated or deleted.

[0144] The invention further encompasses nucleic acid molecules that differ, due to degeneracy of the genetic code, from the nucleotide sequence of nucleic acids encoding a marker protein (e.g., protein having the sequence of the SEQ ID NO (AAs)), and thus encode the same protein.

[0145] It will be appreciated by those skilled in the art that DNA sequence polymorphisms that lead to changes in the amino acid sequence can exist within a population (e.g., the human population). Such genetic polymorphisms can exist among individuals within a population due to natural allelic variation. An allele is one of a group of genes which occur alternatively at a given genetic locus. In addition, it will be appreciated that DNA polymorphisms that affect RNA expression levels can also exist that may affect the overall expression level of that gene (e.g., by affecting regulation or degradation).

[0146] As used herein, the phrase “allelic variant” refers to a nucleotide sequence which occurs at a given locus or to a polypeptide encoded by the nucleotide sequence.

[0147] As used herein, the terms “gene” and “recombinant gene” refer to nucleic acid molecules comprising an open reading frame encoding a polypeptide corresponding to a marker of the invention. Such natural allelic variations can typically result in 1-5% variance in the nucleotide sequence of a given gene. Alternative alleles can be identified by sequencing the gene of interest in a number of different individuals. This can be readily carried out by using hybridization probes to identify the same genetic locus in a variety of individuals. Any and all such nucleotide variations and resulting amino acid polymorphisms or variations that are the result of natural allelic variation and that do not alter the functional activity are intended to be within the scope of the invention.

[0148] In another embodiment, an isolated nucleic acid molecule of the invention is at least 7, 15, 20, 25, 30, 40, 60, 80, 100, 150, 200, 250, 300, 350, 400, 450, 550, 650, 700, 800, 900, 1000, 1200, 1400, 1600, 1800, 2000, 2200, 2400, 2600, 2800, 3000, 3500, 4000, 4500, or more nucleotides in length and hybridizes under stringent conditions to a marker nucleic acid or to a nucleic acid encoding a marker protein. As used herein, the term “hybridizes under stringent conditions” is intended to describe conditions for hybridization and washing under which nucleotide sequences at least 60% (65%, 70%, preferably 75%) identical to each other typically remain hybridized to each other. Such stringent conditions are known to those skilled in the art and can be found in sections 6.3.1-6.3.6 of Current Protocols in Molecular Biology, John Wiley & Sons, N.Y. (1989). A preferred, non-limiting example of stringent hybridization conditions are hybridization in 6× sodium chloride/sodium citrate (SSC) at about 45° C., followed by one or more washes in 0.2×SSC, 0.1% SDS at 50-65° C.

[0149] In addition to naturally-occurring allelic variants of a nucleic acid molecule of the invention that can exist in the population, the skilled artisan will further appreciate that sequence changes can be introduced by mutation thereby leading to changes in the amino acid sequence of the encoded protein, without altering the biological activity of the protein encoded thereby. For example, one can make nucleotide substitutions leading to amino acid substitutions at “non-essential” amino acid residues. A “non-essential” amino acid residue is a residue that can be altered from the wild-type sequence without altering the biological activity, whereas an “essential” amino acid residue is required for biological activity. For example, amino acid residues that are not conserved or only semi-conserved among homologs of various species may be non-essential for activity and thus would be likely targets for alteration. Alternatively, amino acid residues that are conserved among the homologs of various species (e.g., murine and human) may be essential for activity and thus would not be likely targets for alteration.

[0150] Accordingly, another aspect of the invention pertains to nucleic acid molecules encoding a variant marker protein that contain changes in amino acid residues that are not essential for activity. Such variant marker proteins differ in amino acid sequence from the naturally-occurring marker proteins, yet retain biological activity. In one embodiment, such a variant marker protein has an amino acid sequence that is at least about 40% identical, 50%, 60%, 70%, 80%, 90%, 95%, or 98% identical to the amino acid sequence of a marker protein.

[0151] An isolated nucleic acid molecule encoding a variant marker protein can be created by introducing one or more nucleotide substitutions, additions or deletions into the nucleotide sequence of marker nucleic acids, such that one or more amino acid residue substitutions, additions, or deletions are introduced into the encoded protein. Mutations can be introduced by standard techniques, such as site-directed mutagenesis and PCR-mediated mutagenesis. Preferably, conservative amino acid substitutions are made at one or more predicted non-essential amino acid residues. A “conservative amino acid substitution” is one in which the amino acid residue is replaced with an amino acid residue having a similar side chain. Families of amino acid residues having similar side chains have been defined in the art. These families include amino acids with basic side chains (e.g., lysine, arginine, histidine), acidic side chains (e.g., aspartic acid, glutamic acid), uncharged polar side chains (e.g., glycine, asparagine, glutamine, serine, threonine, tyrosine, cysteine), non-polar side chains (e.g., alanine, valine, leucine, isoleucine, proline, phenylalanine, methionine, tryptophan), beta-branched side chains (e.g., threonine, valine, isoleucine) and aromatic side chains (e.g., tyrosine, phenylalanine, tryptophan, histidine). Alternatively, mutations can be introduced randomly along all or part of the coding sequence, such as by saturation mutagenesis, and the resultant mutants can be screened for biological activity to identify mutants that retain activity. Following mutagenesis, the encoded protein can be expressed recombinantly and the activity of the protein can be determined.

[0152] The present invention encompasses antisense nucleic acid molecules, i.e., molecules which are complementary to a sense nucleic acid of the invention, e.g., complementary to the coding strand of a double-stranded marker cDNA molecule or complementary to a marker mRNA sequence. Accordingly, an antisense nucleic acid of the invention can hydrogen bond to (i.e. anneal with) a sense nucleic acid of the invention. The antisense nucleic acid can be complementary to an entire coding strand, or to only a portion thereof, e.g., all or part of the protein coding region (or open reading frame). An antisense nucleic acid molecule can also be antisense to all or part of a non-coding region of the coding strand of a nucleotide sequence encoding a marker protein. The non-coding regions (“5′ and 3′ untranslated regions”) are the 5′ and 3′ sequences which flank the coding region and are not translated into amino acids.

[0153] An antisense oligonucleotide can be, for example, about 5, 10, 15, 20, 25, 30, 35, 40, 45, or 50 or more nucleotides in length. An antisense nucleic acid of the invention can be constructed using chemical synthesis and enzymatic ligation reactions using procedures known in the art. For example, an antisense nucleic acid (e.g., an antisense oligonucleotide) can be chemically synthesized using naturally occurring nucleotides or variously modified nucleotides designed to increase the biological stability of the molecules or to increase the physical stability of the duplex formed between the antisense and sense nucleic acids, e.g., phosphorothioate derivatives and acridine substituted nucleotides can be used. Examples of modified nucleotides which can be used to generate the antisense nucleic acid include 5-fluorouracil, 5-bromouracil, 5-chlorouracil, 5-iodouracil, hypoxanthine, xanthine, 4-acetylcytosine, 5-(carboxyhydroxylmethyl) uracil, 5-carboxymethylaminomethyl-2-thiouridine, 5-carboxymethylaminomethyluracil, dihydrouracil, beta-D-galactosylqueosine, inosine, N6-isopentenyladenine, 1-methylguanine, 1-methylinosine, 2,2-dimethylguanine, 2-methyladenine, 2-methylguanine, 3-methylcytosine, 5-methylcytosine, N6-adenine, 7-methylguanine, 5-methylaminomethyluracil, 5-methoxyaminomethyl-2-thiouracil, beta-D-mannosylqueosine, 5′-methoxycarboxymethyluracil, 5-methoxyuracil, 2-methylthio-N6-isopentenyladenine, uracil-5-oxyacetic acid (v), wybutoxosine, pseudouracil, queosine, 2-thiocytosine, 5-methyl-2-thiouracil, 2-thiouracil, 4-thiouracil, 5-methyluracil, uracil-5-oxyacetic acid methylester, uracil-5-oxyacetic acid (v), 5-methyl-2-thiouracil, 3-(3-amino-3-N-2-carboxypropyl) uracil, (acp3)w, and 2,6-diaminopurine. Alternatively, the antisense nucleic acid can be produced biologically using an expression vector into which a nucleic acid has been sub-cloned in an antisense orientation (i.e., RNA transcribed from the inserted nucleic acid will be of an antisense orientation to a target nucleic acid of interest, described further in the following subsection).

[0154] The antisense nucleic acid molecules of the invention are typically administered to a subject or generated in situ such that they hybridize with or bind to cellular mRNA and/or genomic DNA encoding a marker protein to thereby inhibit expression of the marker, e.g., by inhibiting transcription and/or translation. The hybridization can be by conventional nucleotide complementarity to form a stable duplex, or, for example, in the case of an antisense nucleic acid molecule which binds to DNA duplexes, through specific interactions in the major groove of the double helix. Examples of a route of administration of antisense nucleic acid molecules of the invention includes direct injection at a tissue site or infusion of the antisense nucleic acid into a prostate-associated body fluid. Alternatively, antisense nucleic acid molecules can be modified to target selected cells and then administered systemically. For example, for systemic administration, antisense molecules can be modified such that they specifically bind to receptors or antigens expressed on a selected cell surface, e.g., by linking the antisense nucleic acid molecules to peptides or antibodies which bind to cell surface receptors or antigens. The antisense nucleic acid molecules can also be delivered to cells using the vectors described herein. To achieve sufficient intracellular concentrations of the antisense molecules, vector constructs in which the antisense nucleic acid molecule is placed under the control of a strong pol II or pol III promoter are preferred.

[0155] An antisense nucleic acid molecule of the invention can be an α-anomeric nucleic acid molecule. An α-anomeric nucleic acid molecule forms specific double-stranded hybrids with complementary RNA in which, contrary to the usual α-units, the strands run parallel to each other (Gaultier et al., 1987, Nucleic Acids Res. 15:6625-6641). The antisense nucleic acid molecule can also comprise a 2′-o-methylribonucleotide (Inoue et al., 1987, Nucleic Acids Res. 15:6131-6148) or a chimeric RNA-DNA analogue (Inoue et al., 1987, FEBS Lett. 215:327-330).

[0156] The invention also encompasses ribozymes. Ribozymes are catalytic RNA molecules with ribonuclease activity which are capable of cleaving a single-stranded nucleic acid, such as an mRNA, to which they have a complementary region. Thus, ribozymes (e.g., hammerhead ribozymes as described in Haselhoff and Gerlach, 1988, Nature 334:585-591) can be used to catalytically cleave mRNA transcripts to thereby inhibit translation of the protein encoded by the mRNA. A ribozyme having specificity for a nucleic acid molecule encoding a marker protein can be designed based upon the nucleotide sequence of a cDNA corresponding to the marker. For example, a derivative of a Tetrahymena L-19 IVS RNA can be constructed in which the nucleotide sequence of the active site is complementary to the nucleotide sequence to be cleaved (see Cech et al. U.S. Pat. No. 4,987,071; and Cech et al. U.S. Pat. No. 5,116,742). Alternatively, an mRNA encoding a polypeptide of the invention can be used to select a catalytic RNA having a specific ribonuclease activity from a pool of RNA molecules (see, e.g., Bartel and Szostak, 1993, Science 261:1411-1418).

[0157] The invention also encompasses nucleic acid molecules which form triple helical structures. For example, expression of a marker of the invention can be inhibited by targeting nucleotide sequences complementary to the regulatory region of the gene encoding the marker nucleic acid or protein (e.g., the promoter and/or enhancer) to form triple helical structures that prevent transcription of the gene in target cells. See generally Helene (1991) Anticancer Drug Des. 6(6):569-84; Helene (1992) Ann. N.Y Acad. Sci. 660:27-36; and Maher (1992) Bioassays 14(12):807-15.

[0158] In various embodiments, the nucleic acid molecules of the invention can be modified at the base moiety, sugar moiety or phosphate backbone to improve, e.g., the stability, hybridization, or solubility of the molecule. For example, the deoxyribose phosphate backbone of the nucleic acids can be modified to generate peptide nucleic acids (see Hyrup et al., 1996, Bioorganic & Medicinal Chemistry 4(1): 5-23). As used herein, the terms “peptide nucleic acids” or “PNAs” refer to nucleic acid mimics, e.g., DNA mimics, in which the deoxyribose phosphate backbone is replaced by a pseudopeptide backbone and only the four natural nucleobases are retained. The neutral backbone of PNAs has been shown to allow for specific hybridization to DNA and RNA under conditions of low ionic strength. The synthesis of PNA oligomers can be performed using standard solid phase peptide synthesis protocols as described in Hyrup et al. (1996), supra; Perry-O'Keefe et al. (1996) Proc. Natl. Acad. Sci. USA 93:14670-675.

[0159] PNAs can be used in therapeutic and diagnostic applications. For example, PNAs can be used as antisense or antigene agents for sequence-specific modulation of gene expression by, e.g., inducing transcription or translation arrest or inhibiting replication. PNAs can also be used, e.g., in the analysis of single base pair mutations in a gene by, e.g., PNA directed PCR clamping; as artificial restriction enzymes when used in combination with other enzymes, e.g., S1 nucleases (Hyrup (1996), supra; or as probes or primers for DNA sequence and hybridization (Hyrup, 1996, supra; Perry-O'Keefe et al., 1996, Proc. Natl. Acad. Sci. USA 93:14670-675).

[0160] In another embodiment, PNAs can be modified, e.g., to enhance their stability or cellular uptake, by attaching lipophilic or other helper groups to PNA, by the formation of PNA-DNA chimeras, or by the use of liposomes or other techniques of drug delivery known in the art. For example, PNA-DNA chimeras can be generated which can combine the advantageous properties of PNA and DNA. Such chimeras allow DNA recognition enzymes, e.g., RNase H and DNA polymerases, to interact with the DNA portion while the PNA portion would provide high binding affinity and specificity. PNA-DNA chimeras can be linked using linkers of appropriate lengths selected in terms of base stacking, number of bonds between the nucleobases, and orientation (Hyrup, 1996, supra). The synthesis of PNA-DNA chimeras can be performed as described in Hyrup (1996), supra, and Finn et al. (1996) Nucleic Acids Res. 24(17):3357-63. For example, a DNA chain can be synthesized on a solid support using standard phosphoramidite coupling chemistry and modified nucleoside analogs. Compounds such as 5′-(4-methoxytrityl)amino-5′-deoxy-thymidine phosphoramidite can be used as a link between the PNA and the 5′ end of DNA (Mag et al., 1989, Nucleic Acids Res. 17:5973-88). PNA monomers are then coupled in a step-wise manner to produce a chimeric molecule with a 5′ PNA segment and a 3′ DNA segment (Finn et al., 1996, Nucleic Acids Res. 24(17):3357-63). Alternatively, chimeric molecules can be synthesized with a 5′ DNA segment and a 3′ PNA segment (Peterser et al., 1975, Bioorganic Med. Chem. Lett. 5:1119-11124).

[0161] In other embodiments, the oligonucleotide can include other appended groups such as peptides (e.g., for targeting host cell receptors in vivo), or agents facilitating transport across the cell membrane (see, e.g., Letsinger et al., 1989, Proc. Natl. Acad. Sci. USA 86:6553-6556; Lemaitre et al., 1987, Proc. Natl. Acad. Sci. USA 84:648-652; PCT Publication No. WO 88/09810) or the blood-brain barrier (see, e.g., PCT Publication No. WO 89/10134). In addition, oligonucleotides can be modified with hybridization-triggered cleavage agents (see, e.g., Krol et al., 1988, Bio/Techniques 6:958-976) or intercalating agents (see, e.g., Zon, 1988, Pharm. Res. 5:539-549). To this end, the oligonucleotide can be conjugated to another molecule, e.g., a peptide, hybridization triggered cross-linking agent, transport agent, hybridization-triggered cleavage agent, etc.

[0162] The invention also includes molecular beacon nucleic acids having at least one region which is complementary to a nucleic acid of the invention, such that the molecular beacon is useful for quantitating the presence of the nucleic acid of the invention in a sample. A “molecular beacon” nucleic acid is a nucleic acid comprising a pair of complementary regions and having a fluorophore and a fluorescent quencher associated therewith. The fluorophore and quencher are associated with different portions of the nucleic acid in such an orientation that when the complementary regions are annealed with one another, fluorescence of the fluorophore is quenched by the quencher. When the complementary regions of the nucleic acid are not annealed with one another, fluorescence of the fluorophore is quenched to a lesser degree. Molecular beacon nucleic acids are described, for example, in U.S. Pat. No. 5,876,930.

### II. Isolated Proteins and Antibodies

[0163] One aspect of the invention pertains to isolated marker proteins and biologically active portions thereof, as well as polypeptide fragments suitable for use as immunogens to raise antibodies directed against a marker protein or a fragment thereof. In one embodiment, the native marker protein can be isolated from cells or tissue sources by an appropriate purification scheme using standard protein purification techniques. In another embodiment, a protein or peptide comprising the whole or a segment of the marker protein is produced by recombinant DNA techniques. Alternative to recombinant expression, such protein or peptide can be synthesized chemically using standard peptide synthesis techniques.

[0164] An “isolated” or “purified” protein or biologically active portion thereof is substantially free of cellular material or other contaminating proteins from the cell or tissue source from which the protein is derived, or substantially free of chemical precursors or other chemicals when chemically synthesized. The language “substantially free of cellular material” includes preparations of protein in which the protein is separated from cellular components of the cells from which it is isolated or recombinantly produced. Thus, protein that is substantially free of cellular material includes preparations of protein having less than about 30%, 20%, 10%, or 5% (by dry weight) of heterologous protein (also referred to herein as a “contaminating protein”). When the protein or biologically active portion thereof is recombinantly produced, it is also preferably substantially free of culture medium, i.e., culture medium represents less than about 20%, 10%, or 5% of the volume of the protein preparation. When the protein is produced by chemical synthesis, it is preferably substantially free of chemical precursors or other chemicals, i.e., it is separated from chemical precursors or other chemicals which are involved in the synthesis of the protein. Accordingly such preparations of the protein have less than about 30%, 20%, 10%, 5% (by dry weight) of chemical precursors or compounds other than the polypeptide of interest.

[0165] Biologically active portions of a marker protein include polypeptides comprising amino acid sequences sufficiently identical to or derived from the amino acid sequence of the marker protein, which include fewer amino acids than the full length protein, and exhibit at least one activity of the corresponding full-length protein. Typically, biologically active portions comprise a domain or motif with at least one activity of the corresponding full-length protein. A biologically active portion of a marker protein of the invention can be a polypeptide which is, for example, 10, 25, 50, 100 or more amino acids in length. Moreover, other biologically active portions, in which other regions of the marker protein are deleted, can be prepared by recombinant techniques and evaluated for one or more of the functional activities of the native form of the marker protein.

[0166] Preferred marker proteins are encoded by nucleotide sequences comprising the sequence of any of the SEQ ID NO (nts). Other useful proteins are substantially identical (e.g., at least about 40%, preferably 50%, 60%, 70%, 80%, 90%, 95%, or 99%) to one of these sequences and retain the functional activity of the corresponding naturally-occurring marker protein yet differ in amino acid sequence due to natural allelic variation or mutagenesis.

[0167] To determine the percent identity of two amino acid sequences or of two nucleic acids, the sequences are aligned for optimal comparison purposes (e.g., gaps can be introduced in the sequence of a first amino acid or nucleic acid sequence for optimal alignment with a second amino or nucleic acid sequence). The amino acid residues or nucleotides at corresponding amino acid positions or nucleotide positions are then compared. When a position in the first sequence is occupied by the same amino acid residue or nucleotide as the corresponding position in the second sequence, then the molecules are identical at that position. The percent identity between the two sequences is a function of the number of identical positions shared by the sequences (i.e., % identity=# of identical positions/total # of positions (e.g., overlapping positions)×100). In one embodiment the two sequences are the same length.

[0168] The determination of percent identity between two sequences can be accomplished using a mathematical algorithm. A preferred, non-limiting example of a mathematical algorithm utilized for the comparison of two sequences is the algorithm of Karlin and Altschul (1990) Proc. Natl. Acad. Sci. USA 87:2264-2268, modified as in Karlin and Altschul (1993) Proc. Natl. Acad. Sci. USA 90:5873-5877. Such an algorithm is incorporated into the BLASTN and BLASTX programs of Altschul, et al. (1990) J. Mol. Biol. 215:403-410. BLAST nucleotide searches can be performed with the BLASTN program, score=100, wordlength=12 to obtain nucleotide sequences homologous to a nucleic acid molecules of the invention. BLAST protein searches can be performed with the BLASTP program, score=50, wordlength=3 to obtain amino acid sequences homologous to a protein molecules of the invention. To obtain gapped alignments for comparison purposes, a newer version of the BLAST algorithm called Gapped BLAST can be utilized as described in Altschul et al. (1997) Nucleic Acids Res. 25:3389-3402, which is able to perform gapped local alignments for the programs BLASTN, BLASTP and BLASTX. Alternatively, PSI-Blast can be used to perform an iterated search which detects distant relationships between molecules. When utilizing BLAST, Gapped BLAST, and PSI-Blast programs, the default parameters of the respective programs (e.g., BLASTX and BLASTN) can be used. See http://www.ncbi.nlm.nih.gov. Another preferred, non-limiting example of a mathematical algorithm utilized for the comparison of sequences is the algorithm of Myers and Miller, (1988) CABIOS 4:11-17. Such an algorithm is incorporated into the ALIGN program (version 2.0) which is part of the GCG sequence alignment software package. When utilizing the ALIGN program for comparing amino acid sequences, a PAM120 weight residue table, a gap length penalty of 12, and a gap penalty of 4 can be used. Yet another useful algorithm for identifying regions of local sequence similarity and alignment is the FASTA algorithm as described in Pearson and Lipman (1988) Proc. Natl. Acad. Sci. USA 85:2444-2448. When using the FASTA algorithm for comparing nucleotide or amino acid sequences, a PAM120 weight residue table can, for example, be used with a k-tuple value of 2.

[0169] The percent identity between two sequences can be determined using techniques similar to those described above, with or without allowing gaps. In calculating percent identity, only exact matches are counted.

[0170] The invention also provides chimeric or fusion proteins comprising a marker protein or a segment thereof. As used herein, a “chimeric protein” or “fusion protein” comprises all or part (preferably a biologically active part) of a marker protein operably linked to a heterologous polypeptide (i.e., a polypeptide other than the marker protein). Within the fusion protein, the term “operably linked” is intended to indicate that the marker protein or segment thereof and the heterologous polypeptide are fused in-frame to each other. The heterologous polypeptide can be fused to the amino-terminus or the carboxyl-terminus of the marker protein or segment.

[0171] One useful fusion protein is a GST fusion protein in which a marker protein or segment is fused to the carboxyl terminus of GST sequences. Such fusion proteins can facilitate the purification of a recombinant polypeptide of the invention.

[0172] In another embodiment, the fusion protein contains a heterologous signal sequence at its amino terminus. For example, the native signal sequence of a marker protein can be removed and replaced with a signal sequence from another protein. For example, the gp67 secretory sequence of the baculovirus envelope protein can be used as a heterologous signal sequence (Ausubel et al, ed., Current Protocols in Molecular Biology, John Wiley & Sons, NY, 1992). Other examples of eukaryotic heterologous signal sequences include the secretory sequences of melittin and human placental alkaline phosphatase (Stratagene; La Jolla, Calif.). In yet another example, useful prokaryotic heterologous signal sequences include the phoA secretory signal (Sambrook et al, supra) and the protein A secretory signal (Pharmacia Biotech; Piscataway, N.J.).

[0173] In yet another embodiment, the fusion protein is an immunoglobulin fusion protein in which all or part of a marker protein is fused to sequences derived from a member of the immunoglobulin protein family. The immunoglobulin fusion proteins of the invention can be incorporated into pharmaceutical compositions and administered to a subject to inhibit an interaction between a ligand (soluble or membrane-bound) and a protein on the surface of a cell (receptor), to thereby suppress signal transduction in vivo. The immunoglobulin fusion protein can be used to affect the bioavailability of a cognate ligand of a marker protein. Inhibition of ligand/receptor interaction can be useful therapeutically, both for treating proliferative and differentiative disorders and for modulating (e.g. promoting or inhibiting) cell survival. Moreover, the immunoglobulin fusion proteins of the invention can be used as immunogens to produce antibodies directed against a marker protein in a subject, to purify ligands and in screening assays to identify molecules which inhibit the interaction of the marker protein with ligands.

[0174] Chimeric and fusion proteins of the invention can be produced by standard recombinant DNA techniques. In another embodiment, the fusion gene can be synthesized by conventional techniques including automated DNA synthesizers. Alternatively, PCR amplification of gene fragments can be carried out using anchor primers which give rise to complementary overhangs between two consecutive gene fragments which can subsequently be annealed and re-amplified to generate a chimeric gene sequence (see, e.g., Ausubel et al., supra). Moreover, many expression vectors are commercially available that already encode a fusion moiety (e.g., a GST polypeptide). A nucleic acid encoding a polypeptide of the invention can be cloned into such an expression vector such that the fusion moiety is linked in-frame to the polypeptide of the invention.

[0175] A signal sequence can be used to facilitate secretion and isolation of marker proteins. Signal sequences are typically characterized by a core of hydrophobic amino acids which are generally cleaved from the mature protein during secretion in one or more cleavage events. Such signal peptides contain processing sites that allow cleavage of the signal sequence from the mature proteins as they pass through the secretory pathway. Thus, the invention pertains to marker proteins, fusion proteins or segments thereof having a signal sequence, as well as to such proteins from which the signal sequence has been proteolytically cleaved (i.e., the cleavage products). In one embodiment, a nucleic acid sequence encoding a signal sequence can be operably linked in an expression vector to a protein of interest, such as a marker protein or a segment thereof. The signal sequence directs secretion of the protein, such as from a eukaryotic host into which the expression vector is transformed, and the signal sequence is subsequently or concurrently cleaved. The protein can then be readily purified from the extracellular medium by art recognized methods. Alternatively, the signal sequence can be linked to the protein of interest using a sequence which facilitates purification, such as with a GST domain.

[0176] The present invention also pertains to variants of the marker proteins. Such variants have an altered amino acid sequence which can function as either agonists (mimetics) or as antagonists. Variants can be generated by mutagenesis, e.g., discrete point mutation or truncation. An agonist can retain substantially the same, or a subset, of the biological activities of the naturally occurring form of the protein. An antagonist of a protein can inhibit one or more of the activities of the naturally occurring form of the protein by, for example, competitively binding to a downstream or upstream member of a cellular signaling cascade which includes the protein of interest. Thus, specific biological effects can be elicited by treatment with a variant of limited function. Treatment of a subject with a variant having a subset of the biological activities of the naturally occurring form of the protein can have fewer side effects in a subject relative to treatment with the naturally occurring form of the protein.

[0177] Variants of a marker protein which function as either agonists (mimetics) or as antagonists can be identified by screening combinatorial libraries of mutants, e.g., truncation mutants, of the protein of the invention for agonist or antagonist activity. In one embodiment, a variegated library of variants is generated by combinatorial mutagenesis at the nucleic acid level and is encoded by a variegated gene library. A variegated library of variants can be produced by, for example, enzymatically ligating a mixture of synthetic oligonucleotides into gene sequences such that a degenerate set of potential protein sequences is expressible as individual polypeptides, or alternatively, as a set of larger fusion proteins (e.g., for phage display). There are a variety of methods which can be used to produce libraries of potential variants of the marker proteins from a degenerate oligonucleotide sequence. Methods for synthesizing degenerate oligonucleotides are known in the art (see, e.g., Narang, 1983, Tetrahedron 39:3; Itakura et al., 1984, Annu. Rev. Biochem. 53:323; Itakura et al., 1984, Science 198:1056; Ike et al., 1983 Nucleic Acid Res. 11:477).

[0178] In addition, libraries of segments of a marker protein can be used to generate a variegated population of polypeptides for screening and subsequent selection of variant marker proteins or segments thereof. For example, a library of coding sequence fragments can be generated by treating a double stranded PCR fragment of the coding sequence of interest with a nuclease under conditions wherein nicking occurs only about once per molecule, denaturing the double stranded DNA, renaturing the DNA to form double stranded DNA which can include sense/antisense pairs from different nicked products, removing single stranded portions from reformed duplexes by treatment with S1 nuclease, and ligating the resulting fragment library into an expression vector. By this method, an expression library can be derived which encodes amino terminal and internal fragments of various sizes of the protein of interest.

[0179] Several techniques are known in the art for screening gene products of combinatorial libraries made by point mutations or truncation, and for screening cDNA libraries for gene products having a selected property. The most widely used techniques, which are amenable to high through-put analysis, for screening large gene libraries typically include cloning the gene library into replicable expression vectors, transforming appropriate cells with the resulting library of vectors, and expressing the combinatorial genes under conditions in which detection of a desired activity facilitates isolation of the vector encoding the gene whose product was detected. Recursive ensemble mutagenesis (REM), a technique which enhances the frequency of functional mutants in the libraries, can be used in combination with the screening assays to identify variants of a protein of the invention (Arkin and Yourvan, 1992, Proc. Natl. Acad. Sci. USA 89:7811-7815; Delgrave et al., 1993, Protein Engineering 6(3):327- 331).

[0180] Another aspect of the invention pertains to antibodies directed against a protein of the invention. In preferred embodiments, the antibodies specifically bind a marker protein or a fragment thereof. The terms “antibody” and “antibodies” as used interchangeably herein refer to immunoglobulin molecules as well as fragments and derivatives thereof that comprise an immunologically active portion of an immunoglobulin molecule, (i.e., such a portion contains an antigen binding site which specifically binds an antigen, such as a marker protein, e.g., an epitope of a marker protein). An antibody which specifically binds to a protein of the invention is an antibody which binds the protein, but does not substantially bind other molecules in a sample, e.g., a biological sample, which naturally contains the protein. Examples of an immunologically active portion of an immunoglobulin molecule include, but are not limited to, single-chain antibodies (scAb), F(ab) and F(ab′)₂ fragments.

[0181] An isolated protein of the invention or a fragment thereof can be used as an immunogen to generate antibodies. The full-length protein can be used or, alternatively, the invention provides antigenic peptide fragments for use as immunogens. The antigenic peptide of a protein of the invention comprises at least 8 (preferably 10, 15, 20, or 30 or more) amino acid residues of the amino acid sequence of one of the proteins of the invention, and encompasses at least one epitope of the protein such that an antibody raised against the peptide forms a specific immune complex with the protein. Preferred epitopes encompassed by the antigenic peptide are regions that are located on the surface of the protein, e.g., hydrophilic regions. Hydrophobicity sequence analysis, hydrophilicity sequence analysis, or similar analyses can be used to identify hydrophilic regions. In preferred embodiments, an isolated marker protein or fragment thereof is used as an immunogen.

[0182] An immunogen typically is used to prepare antibodies by immunizing a suitable (i.e. immunocompetent) subject such as a rabbit, goat, mouse, or other mammal or vertebrate. An appropriate immunogenic preparation can contain, for example, recombinantly-expressed or chemically-synthesized protein or peptide. The preparation can further include an adjuvant, such as Freund's complete or incomplete adjuvant, or a similar immunostimulatory agent. Preferred immunogen compositions are those that contain no other human proteins such as, for example, immunogen compositions made using a non-human host cell for recombinant expression of a protein of the invention. In such a manner, the resulting antibody compositions have reduced or no binding of human proteins other than a protein of the invention.

[0183] The invention provides polyclonal and monoclonal antibodies. The term “monoclonal antibody” or “monoclonal antibody composition”, as used herein, refers to a population of antibody molecules that contain only one species of an antigen binding site capable of immunoreacting with a particular epitope. Preferred polyclonal and monoclonal antibody compositions are ones that have been selected for antibodies directed against a protein of the invention. Particularly preferred polyclonal and monoclonal antibody preparations are ones that contain only antibodies directed against a marker protein or fragment thereof.

[0184] Polyclonal antibodies can be prepared by immunizing a suitable subject with a protein of the invention as an immunogen The antibody titer in the immunized subject can be monitored over time by standard techniques, such as with an enzyme linked immunosorbent assay (ELISA) using immobilized polypeptide. At an appropriate time after immunization, e.g., when the specific antibody titers are highest, antibody-producing cells can be obtained from the subject and used to prepare monoclonal antibodies (mAb) by standard techniques, such as the hybridoma technique originally described by Kohler and Milstein (1975) Nature 256:495-497, the human B cell hybridoma technique (see Kozbor et al., 1983, Immunol. Today 4:72), the EBV-hybridoma technique (see Cole et al., pp. 77-96 In Monoclonal Antibodies and Cancer Therapy, Alan R. Liss, Inc., 1985) or trioma techniques. The technology for producing hybridomas is well known (see generally Current Protocols in Immunology, Coligan et al. ed., John Wiley & Sons, New York, 1994). Hybridoma cells producing a monoclonal antibody of the invention are detected by screening the hybridoma culture supernatants for antibodies that bind the polypeptide of interest, e.g., using a standard ELISA assay.

[0185] Alternative to preparing monoclonal antibody-secreting hybridomas, a monoclonal antibody directed against a protein of the invention can be identified and isolated by screening a recombinant combinatorial immunoglobulin library (e.g., an antibody phage display library) with the polypeptide of interest. Kits for generating and screening phage display libraries are commercially available (e.g., the Pharmacia Recombinant Phage Antibody System, Catalog No. 27-9400-01; and the Stratagene SurƒZAP Phage Display Kit, Catalog No. 240612). Additionally, examples of methods and reagents particularly amenable for use in generating and screening antibody display library can be found in, for example, U.S. Pat. No. 5,223,409; PCT Publication No. WO 92/18619; PCT Publication No. WO 91/17271; PCT Publication No. WO 92/20791; PCT Publication No. WO 92/15679; PCT Publication No. WO 93/01288; PCT Publication No. WO 92/01047; PCT Publication No. WO 92/09690; PCT Publication No. WO 90/02809; Fuchs et al. (1991) Bio/Technology 9:1370-1372; Hay et al. (1992) Hum. Antibod. Hybridomas 3:81-85; Huse et al. (1989) Science 246:1275- 1281; Griffiths et al. (1993) EMBO J 12:725-734.

[0186] The invention also provides recombinant antibodies that specifically bind a protein of the invention. In preferred embodiments, the recombinant antibodies specifically binds a marker protein or fragment thereof. Recombinant antibodies include, but are not limited to, chimeric and humanized monoclonal antibodies, comprising both human and non-human portions, single-chain antibodies and multi-specific antibodies. A chimeric antibody is a molecule in which different portions are derived from different animal species, such as those having a variable region derived from a murine mAb and a human immunoglobulin constant region. (See, e.g., Cabilly et al., U.S. Pat. No. 4,816,567; and Boss et al., U.S. Pat. No. 4,816,397, which are incorporated herein by reference in their entirety.) Single-chain antibodies have an antigen binding site and consist of a single polypeptide. They can be produced by techniques known in the art, for example using methods described in Ladner et. al U.S. Pat. No. 4,946,778 (which is incorporated herein by reference in its entirety); Bird et al., (1988) Science 242:423-426; Whitlow et al., (1991) Methods in Enzymology 2:1-9; Whitlow et al., (1991) Methods in Enzymology 2:97-105; and Huston et al., (1991) Methods in Enzymology Molecular Design and Modeling: Concepts and Applications 203:46-88. Multi-specific antibodies are antibody molecules having at least two antigen-binding sites that specifically bind different antigens. Such molecules can be produced by techniques known in the art, for example using methods described in Segal, U.S. Pat. No. 4,676,980 (the disclosure of which is incorporated herein by reference in its entirety); Holliger et al., (1993) Proc. Natl. Acad. Sci. USA 90:6444-6448; Whitlow et al., (1994) Protein Eng. 7:1017-1026 and U.S. Pat. No. 6,121,424.

[0187] Humanized antibodies are antibody molecules from non-human species having one or more complementarity determining regions (CDRs) from the non-human species and a framework region from a human immunoglobulin molecule. (See, e.g., Queen, U.S. Pat. No. 5,585,089, which is incorporated herein by reference in its entirety.) Humanized monoclonal antibodies can be produced by recombinant DNA techniques known in the art, for example using methods described in PCT Publication No. WO 87/02671; European Patent Application 184,187; European Patent Application 171,496; European Patent Application 173,494; PCT Publication No. WO 86/01533; U.S. Pat. No. 4,816,567; European Patent Application 125,023; Better et al. (1988) Science 240:1041-1043; Liu et al. (1987) Proc. Natl. Acad. Sci. USA 84:3439-3443; Liu et al. (1987) J. Immunol. 139:3521- 3526; Sun et al. (1987) Proc. Natl. Acad. Sci. USA 84:214-218; Nishimura et al. (1987) Cancer Res. 47:999-1005; Wood et al. (1985) Nature 314:446-449; and Shaw et al. (1988) J. Natl. Cancer Inst. 80:1553-1559); Morrison (1985) Science 229:1202-1207; Oi et al. (1986) Bio/Techniques 4:214; U.S. Pat. No. 5,225,539; Jones et al. (1986) Nature 321:552-525; Verhoeyan et al. (1988) Science 239:1534; and Beidler et al. (1988) J. Immunol. 141:4053-4060.

[0188] More particularly, humanized antibodies can be produced, for example, using transgenic mice which are incapable of expressing endogenous immunoglobulin heavy and light chains genes, but which can express human heavy and light chain genes. The transgenic mice are immunized in the normal fashion with a selected antigen, e.g., all or a portion of a polypeptide corresponding to a marker of the invention. Monoclonal antibodies directed against the antigen can be obtained using conventional hybridoma technology. The human immunoglobulin transgenes harbored by the transgenic mice rearrange during B cell differentiation, and subsequently undergo class switching and somatic mutation. Thus, using such a technique, it is possible to produce therapeutically useful IgG, IgA and IgE antibodies. For an overview of this technology for producing human antibodies, see Lonberg and Huszar (1995) Int. Rev. Immunol. 13:65-93). For a detailed discussion of this technology for producing human antibodies and human monoclonal antibodies and protocols for producing such antibodies, see, e.g., U.S. Pat. No. 5,625,126; U.S. Pat. No. 5,633,425; U.S. Pat. No. 5,569,825; U.S. Pat. No. 5,661,016; and U.S. Pat. No. 5,545,806. In addition, companies such as Abgenix, Inc. (Freemont, Calif.), can be engaged to provide human antibodies directed against a selected antigen using technology similar to that described above.

[0189] Completely human antibodies which recognize a selected epitope can be generated using a technique referred to as “guided selection.” In this approach a selected non-human monoclonal antibody, e.g., a murine antibody, is used to guide the selection of a completely human antibody recognizing the same epitope (Jespers et al., 1994, Bio/technology 12:899-903).

[0190] The antibodies of the invention can be isolated after production (e.g., from the blood or serum of the subject) or synthesis and further purified by well-known techniques. For example, IgG antibodies can be purified using protein A chromatography. Antibodies specific for a protein of the invention can be selected or (e.g., partially purified) or purified by, e.g., affinity chromatography. For example, a recombinantly expressed and purified (or partially purified) protein of the invention is produced as described herein, and covalently or non-covalently coupled to a solid support such as, for example, a chromatography column. The column can then be used to affinity purify antibodies specific for the proteins of the invention from a sample containing antibodies directed against a large number of different epitopes, thereby generating a substantially purified antibody composition, i.e., one that is substantially free of contaminating antibodies. By a substantially purified antibody composition is meant, in this context, that the antibody sample contains at most only 30% (by dry weight) of contaminating antibodies directed against epitopes other than those of the desired protein of the invention, and preferably at most 20%, yet more preferably at most 10%, and most preferably at most 5% (by dry weight) of the sample is contaminating antibodies. A purified antibody composition means that at least 99% of the antibodies in the composition are directed against the desired protein of the invention.

[0191] In a preferred embodiment, the substantially purified antibodies of the invention may specifically bind to a signal peptide, a secreted sequence, an extracellular domain, a transmembrane or a cytoplasmic domain or cytoplasmic membrane of a protein of the invention. In a particularly preferred embodiment, the substantially purified antibodies of the invention specifically bind to a secreted sequence or an extracellular domain of the amino acid sequences of a protein of the invention. In a more preferred embodiment, the substantially purified antibodies of the invention specifically bind to a secreted sequence or an extracellular domain of the amino acid sequences of a marker protein.

[0192] An antibody directed against a protein of the invention can be used to isolate the protein by standard techniques, such as affinity chromatography or immunoprecipitation. Moreover, such an antibody can be used to detect the marker protein or fragment thereof (e.g., in a cellular lysate or cell supernatant) in order to evaluate the level and pattern of expression of the marker. The antibodies can also be used diagnostically to monitor protein levels in tissues or body fluids (e.g. in a prostate-associated body fluid) as part of a clinical testing procedure, e.g., to, for example, determine the efficacy of a given treatment regimen. Detection can be facilitated by the use of an antibody derivative, which comprises an antibody of the invention coupled to a detectable substance. Examples of detectable substances include various enzymes, prosthetic groups, fluorescent materials, luminescent materials, bioluminescent materials, and radioactive materials. Examples of suitable enzymes include horseradish peroxidase, alkaline phosphatase, β-galactosidase, or acetylcholinesterase; examples of suitable prosthetic group complexes include streptavidin/biotin and avidinibiotin; examples of suitable fluorescent materials include umbelliferone, fluorescein, fluorescein isothiocyanate, rhodamine, dichlorotriazinylamine fluorescein, dansyl chloride or phycoerythrin; an example of a luminescent material includes luminol; examples of bioluminescent materials include luciferase, luciferin, and aequorin, and examples of suitable radioactive material include ¹²⁵I, ¹³¹I, ³⁵S or ³H.

[0193] Antibodies of the invention may also be used as therapeutic agents in treating cancers. In a preferred embodiment, completely human antibodies of the invention are used for therapeutic treatment of human cancer patients, particularly those having an prostate cancer. In another preferred embodiment, antibodies that bind specifically to a marker protein or fragment thereof are used for therapeutic treatment. Further, such therapeutic antibody may be an antibody derivative or immunotoxin comprising an antibody conjugated to a therapeutic moiety such as a cytotoxin, a therapeutic agent or a radioactive metal ion. A cytotoxin or cytotoxic agent includes any agent that is detrimental to cells. Examples include taxol, cytochalasin B, gramicidin D, ethidium bromide, emetine, mitomycin, etoposide, tenoposide, vincristine, vinblastine, colchicin, doxorubicin, daunorubicin, dihydroxy anthracin dione, mitoxantrone, mithramycin, actinomycin D, 1-dehydrotestosterone, glucocorticoids, procaine, tetracaine, lidocaine, propranolol, and puromycin and analogs or homologs thereof. Therapeutic agents include, but are not limited to, antimetabolites (e.g., methotrexate, 6-mercaptopurine, 6-thioguanine, cytarabine, 5-fluorouracil decarbazine), alkylating agents (e.g., mechlorethamine, thioepa chlorambucil, melphalan, carmustine (BSNU) and lomustine (CCNU), cyclothosphamide, busulfan, dibromomannitol, streptozotocin, mitomycin C, and cis-dichlorodiamine platinum (II) (DDP) cisplatin), anthracyclines (e.g., daunorubicin (formerly daunomycin) and doxorubicin), antibiotics (e.g., dactinomycin (formerly actinomycin), bleomycin, mithramycin, and anthramycin (AMC)), and anti-mitotic agents (e.g., vincristine and vinblastine).

[0194] The conjugated antibodies of the invention can be used for modifying a given biological response, for the drug moiety is not to be construed as limited to classical chemical therapeutic agents. For example, the drug moiety may be a protein or polypeptide possessing a desired biological activity. Such proteins may include, for example, a toxin such as ribosome-inhibiting protein (see Better et al., U.S. Pat. No. 6,146,631, the disclosure of which is incorporated herein in its entirety), abrin, ricin A, pseudomonas exotoxin, or diphtheria toxin; a protein such as tumor necrosis factor, .alpha.-interferon, .beta.-interferon, nerve growth factor, platelet derived growth factor, tissue plasminogen activator; or, biological response modifiers such as, for example, lymphokines, interleukin-1 (“IL-1”), interleukin-2 (“IL-2”), interleukin-6 (“IL-6”), granulocyte macrophase colony stimulating factor (“GM-CSF”), granulocyte colony stimulating factor (“G-CSF”), or other growth factors.

[0195] Techniques for conjugating such therapeutic moiety to antibodies are well known, see, e.g., Arnon et al., “Monoclonal Antibodies For Immunotargeting Of Drugs In Cancer Therapy”, in Monoclonal Antibodies And Cancer Therapy, Reisfeld et al. (eds.), pp. 243-56 (Alan R. Liss, Inc. 1985); Hellstrom et al., “Antibodies For Drug Delivery”, in Controlled Drug Delivery (2nd Ed.), Robinson et al. (eds.), pp. 623-53 (Marcel Dekker, Inc. 1987); Thorpe, “Antibody Carriers Of Cytotoxic Agents In Cancer Therapy: A Review”, in Monoclonal Antibodies '84: Biological And Clinical Applications, Pinchera et al. (eds.), pp. 475-506 (1985); “Analysis, Results, And Future Prospective Of The Therapeutic Use Of Radiolabeled Antibody In Cancer Therapy”, in Monoclonal Antibodies For Cancer Detection And Therapy, Baldwin et al. (eds.), pp. 303-16 (Academic Press 1985), and Thorpe et al., “The Preparation And Cytotoxic Properties Of Antibody-Toxin Conjugates”, Immunol. Rev., 62:119-58 (1982).

[0196] Accordingly, in one aspect, the invention provides substantially purified antibodies, antibody fragments and derivatives, all of which specifically bind to a protein of the invention and preferably, a marker protein. In various embodiments, the substantially purified antibodies of the invention, or fragments or derivatives thereof, can be human, non-human, chimeric and/or humanized antibodies. In another aspect, the invention provides non-human antibodies, antibody fragments and derivatives, all of which specifically bind to a protein of the invention and preferably, a marker protein. Such non-human antibodies can be goat, mouse, sheep, horse, chicken, rabbit, or rat antibodies. Alternatively, the non-human antibodies of the invention can be chimeric and/or humanized antibodies. In addition, the non-human antibodies of the invention can be polyclonal antibodies or monoclonal antibodies. In still a further aspect, the invention provides monoclonal antibodies, antibody fragments and derivatives, all of which specifically bind to a protein of the invention and preferably, a marker protein. The monoclonal antibodies can be human, humanized, chimeric and/or non-human antibodies.

[0197] The invention also provides a kit containing an antibody of the invention conjugated to a detectable substance, and instructions for use. Still another aspect of the invention is a pharmaceutical composition comprising an antibody of the invention. In one embodiment, the pharmaceutical composition comprises an antibody of the invention and a pharmaceutically acceptable carrier.

### III. Recombinant Expression Vectors and Host Cells

[0198] Another aspect of the invention pertains to vectors, preferably expression vectors, containing a nucleic acid encoding a marker protein (or a portion of such a protein). As used herein, the term “vector” refers to a nucleic acid molecule capable of transporting another nucleic acid to which it has been linked. One type of vector is a “plasmid”, which refers to a circular double stranded DNA loop into which additional DNA segments can be ligated. Another type of vector is a viral vector, wherein additional DNA segments can be ligated into the viral genome. Certain vectors are capable of autonomous replication in a host cell into which they are introduced (e.g., bacterial vectors having a bacterial origin of replication and episomal mammalian vectors). Other vectors (e.g., non-episomal mammalian vectors) are integrated into the genome of a host cell upon introduction into the host cell, and thereby are replicated along with the host genome. Moreover, certain vectors, namely expression vectors, are capable of directing the expression of genes to which they are operably linked. In general, expression vectors of utility in recombinant DNA techniques are often in the form of plasmids (vectors). However, the invention is intended to include such other forms of expression vectors, such as viral vectors (e.g., replication defective retroviruses, adenoviruses and adeno-associated viruses), which serve equivalent functions.

[0199] The recombinant expression vectors of the invention comprise a nucleic acid of the invention in a form suitable for expression of the nucleic acid in a host cell. This means that the recombinant expression vectors include one or more regulatory sequences, selected on the basis of the host cells to be used for expression, which is operably linked to the nucleic acid sequence to be expressed. Within a recombinant expression vector, “operably linked” is intended to mean that the nucleotide sequence of interest is linked to the regulatory sequence(s) in a manner which allows for expression of the nucleotide sequence (e.g., in an in vitro transcription/translation system or in a host cell when the vector is introduced into the host cell). The term “regulatory sequence” is intended to include promoters, enhancers and other expression control elements (e.g., polyadenylation signals). Such regulatory sequences are described, for example, in Goeddel, Methods in Enzymology: Gene Expression Technology vol. 185, Academic Press, San Diego, Calif. (1991). Regulatory sequences include those which direct constitutive expression of a nucleotide sequence in many types of host cell and those which direct expression of the nucleotide sequence only in certain host cells (e.g., tissue-specific regulatory sequences). It will be appreciated by those skilled in the art that the design of the expression vector can depend on such factors as the choice of the host cell to be transformed, the level of expression of protein desired, and the like. The expression vectors of the invention can be introduced into host cells to thereby produce proteins or peptides, including fusion proteins or peptides, encoded by nucleic acids as described herein.

[0200] The recombinant expression vectors of the invention can be designed for expression of a marker protein or a segment thereof in prokaryotic (e.g., E. coli) or eukaryotic cells (e.g., insect cells {using baculovirus expression vectors}, yeast cells or mammalian cells). Suitable host cells are discussed further in Goeddel, supra. Alternatively, the recombinant expression vector can be transcribed and translated in vitro, for example using T7 promoter regulatory sequences and T7 polymerase.

[0201] Expression of proteins in prokaryotes is most often carried out in E. coli with vectors containing constitutive or inducible promoters directing the expression of either fusion or non-fusion proteins. Fusion vectors add a number of amino acids to a protein encoded therein, usually to the amino terminus of the recombinant protein. Such fusion vectors typically serve three purposes: 1) to increase expression of recombinant protein; 2) to increase the solubility of the recombinant protein; and 3) to aid in the purification of the recombinant protein by acting as a ligand in affinity purification. Often, in fusion expression vectors, a proteolytic cleavage site is introduced at the junction of the fusion moiety and the recombinant protein to enable separation of the recombinant protein from the fusion moiety subsequent to purification of the fusion protein. Such enzymes, and their cognate recognition sequences, include Factor Xa, thrombin and enterokinase. Typical fusion expression vectors include pGEX (Pharmacia Biotech Inc; Smith and Johnson, 1988, Gene 67:31-40), pMAL (New England Biolabs, Beverly, Mass.) and pRIT5 (Pharmacia, Piscataway, N.J.) which fuse glutathione S-transferase (GST), maltose E binding protein, or protein A, respectively, to the target recombinant protein.

[0202] Examples of suitable inducible non-fusion E. coli expression vectors include pTrc (Amann et al., 1988, Gene 69:301-315) and pET ld (Studier et al., p. 60-89, In Gene Expression Technology: Methods in Enzymology vol. 185, Academic Press, San Diego, Calif., 1991). Target gene expression from the pTrc vector relies on host RNA polymerase transcription from a hybrid trp-lac fusion promoter. Target gene expression from the pET 11d vector relies on transcription from a T7 gn10-lac fusion promoter mediated by a co-expressed viral RNA polymerase (T7 gn1). This viral polymerase is supplied by host strains BL21(DE3) or HMS174(DE3) from a resident prophage harboring a T7 gn1 gene under the transcriptional control of the lacUV 5 promoter.

[0203] One strategy to maximize recombinant protein expression in E. coli is to express the protein in a host bacteria with an impaired capacity to proteolytically cleave the recombinant protein (Gottesman, p. 119-128, In Gene Expression Technology: Methods in Enzymology vol. 185, Academic Press, San Diego, Calif., 1990. Another strategy is to alter the nucleic acid sequence of the nucleic acid to be inserted into an expression vector so that the individual codons for each amino acid are those preferentially utilized in E. coli (Wada et al., 1992, Nucleic Acids Res. 20:2111-2118). Such alteration of nucleic acid sequences of the invention can be carried out by standard DNA synthesis techniques.

[0204] In another embodiment, the expression vector is a yeast expression vector. Examples of vectors for expression in yeast S. cerevisiae include pYepSec1 (Baldari et al., 1987, EMBO J. 6:229-234), pMFa (Kurjan and Herskowitz, 1982, Cell 30:933-943), pJRY88 (Schultz et al., 1987, Gene 54:113-123), pYES2 (Invitrogen Corporation, San Diego, Calif.), and pPicZ (Invitrogen Corp, San Diego, Calif.).

[0205] Alternatively, the expression vector is a baculovirus expression vector. Baculovirus vectors available for expression of proteins in cultured insect cells (e.g., Sf 9 cells) include the pAc series (Smith et al., 1983, Mol. Cell Biol. 3:2156-2165) and the pVL series (Lucklow and Summers, 1989, Virology 170:31-39).

[0206] In yet another embodiment, a nucleic acid of the invention is expressed in mammalian cells using a mammalian expression vector. Examples of mammalian expression vectors include pCDM8 (Seed, 1987, Nature 329:840) and pMT2PC (Kaufman et al., 1987, EMBO J. 6:187-195). When used in mammalian cells, the expression vector's control functions are often provided by viral regulatory elements. For example, commonly used promoters are derived from polyoma, Adenovirus 2, cytomegalovirus and Simian Virus 40. For other suitable expression systems for both prokaryotic and eukaryotic cells see chapters 16 and 17 of Sambrook et al., supra.

[0207] In another embodiment, the recombinant mammalian expression vector is capable of directing expression of the nucleic acid preferentially in a particular cell type (e.g., tissue-specific regulatory elements are used to express the nucleic acid). Tissue-specific regulatory elements are known in the art. Non-limiting examples of suitable tissue-specific promoters include the albumin promoter (liver-specific; Pinkert et al., 1987, Genes Dev. 1:268-277), lymphoid-specific promoters (Calame and Eaton, 1988, Adv. Immunol. 43:235-275), in particular promoters of T cell receptors (Winoto and Baltimore, 1989, EMBO J. 8:729-733) and immunoglobulins (Banerji et al., 1983, Cell 33:729-740; Queen and Baltimore, 1983, Cell 33:741-748), neuron-specific promoters (e.g., the neurofilament promoter; Byrne and Ruddle, 1989, Proc. Natl. Acad. Sci. USA 86:5473-5477), pancreas-specific promoters (Edlund et al., 1985, Science 230:912-916), and mammary gland-specific promoters (e.g., milk whey promoter; U.S. Pat. No. 4,873,316 and European Application Publication No. 264,166). Developmentally-regulated promoters are also encompassed, for example the murine hox promoters (Kessel and Gruss, 1990, Science 249:374-379) and the α-fetoprotein promoter (Camper and Tilghman, 1989, Genes Dev. 3:537-546).

[0208] The invention further provides a recombinant expression vector comprising a DNA molecule of the invention cloned into the expression vector in an antisense orientation. That is, the DNA molecule is operably linked to a regulatory sequence in a manner which allows for expression (by transcription of the DNA molecule) of an RNA molecule which is antisense to the mRNA encoding a polypeptide of the invention. Regulatory sequences operably linked to a nucleic acid cloned in the antisense orientation can be chosen which direct the continuous expression of the antisense RNA molecule in a variety of cell types, for instance viral promoters and/or enhancers, or regulatory sequences can be chosen which direct constitutive, tissue-specific or cell type specific expression of antisense RNA. The antisense expression vector can be in the form of a recombinant plasmid, phagemid, or attenuated virus in which antisense nucleic acids are produced under the control of a high efficiency regulatory region, the activity of which can be determined by the cell type into which the vector is introduced. For a discussion of the regulation of gene expression using antisense genes see Weintraub et al., 1986, Trends in Genetics, Vol. 1(1).

[0209] Another aspect of the invention pertains to host cells into which a recombinant expression vector of the invention has been introduced. The terms “host cell” and “recombinant host cell” are used interchangeably herein. It is understood that such terms refer not only to the particular subject cell but to the progeny or potential progeny of such a cell. Because certain modifications may occur in succeeding generations due to either mutation or environmental influences, such progeny may not, in fact, be identical to the parent cell, but are still included within the scope of the term as used herein.

[0210] A host cell can be any prokaryotic (e.g., E. coli) or eukaryotic cell (e.g., insect cells, yeast or mammalian cells).

[0211] Vector DNA can be introduced into prokaryotic or eukaryotic cells via conventional transformation or transfection techniques. As used herein, the terms “transformation” and “transfection” are intended to refer to a variety of art-recognized techniques for introducing foreign nucleic acid into a host cell, including calcium phosphate or calcium chloride co-precipitation, DEAE-dextran-mediated transfection, lipofection, or electroporation. Suitable methods for transforming or transfecting host cells can be found in Sambrook, et al (supra), and other laboratory manuals.

[0212] For stable transfection of mammalian cells, it is known that, depending upon the expression vector and transfection technique used, only a small fraction of cells may integrate the foreign DNA into their genome. In order to identify and select these integrants, a gene that encodes a selectable marker (e.g., for resistance to antibiotics) is generally introduced into the host cells along with the gene of interest. Preferred selectable markers include those which confer resistance to drugs, such as G418, hygromycin and methotrexate. Cells stably transfected with the introduced nucleic acid can be identified by drug selection (e.g., cells that have incorporated the selectable marker will survive, while the other cells die).

[0213] A host cell of the invention, such as a prokaryotic or eukaryotic host cell in culture, can be used to produce a marker protein or a segment thereof. Accordingly, the invention further provides methods for producing a marker protein or a segment thereof using the host cells of the invention. In one embodiment, the method comprises culturing the host cell of the invention (into which a recombinant expression vector encoding a marker protein or a segment thereof has been introduced) in a suitable medium such that the is produced. In another embodiment, the method further comprises isolating the marker protein or a segment thereof from the medium or the host cell.

[0214] The host cells of the invention can also be used to produce nonhuman transgenic animals. For example, in one embodiment, a host cell of the invention is a fertilized oocyte or an embryonic stem cell into which a sequences encoding a marker protein or a segment thereof have been introduced. Such host cells can then be used to create non-human transgenic animals in which exogenous sequences encoding a marker protein of the invention have been introduced into their genome or homologous recombinant animals in which endogenous gene(s) encoding a marker protein have been altered. Such animals are useful for studying the function and/or activity of the marker protein and for identifying and/or evaluating modulators of marker protein. As used herein, a “transgenic animal” is a non-human animal, preferably a mammal, more preferably a rodent such as a rat or mouse, in which one or more of the cells of the animal includes a transgene. Other examples of transgenic animals include non-human primates, sheep, dogs, cows, goats, chickens, amphibians, etc. A transgene is exogenous DNA which is integrated into the genome of a cell from which a transgenic animal develops and which remains in the genome of the mature animal, thereby directing the expression of an encoded gene product in one or more cell types or tissues of the transgenic animal. As used herein, an “homologous recombinant animal” is a non-human animal, preferably a mammal, more preferably a mouse, in which an endogenous gene has been altered by homologous recombination between the endogenous gene and an exogenous DNA molecule introduced into a cell of the animal, e.g., an embryonic cell of the animal, prior to development of the animal.

[0215] A transgenic animal of the invention can be created by introducing a nucleic acid encoding a marker protein into the male pronuclei of a fertilized oocyte, e.g., by microinjection, retroviral infection, and allowing the oocyte to develop in a pseudopregnant female foster animal. Intronic sequences and polyadenylation signals can also be included in the transgene to increase the efficiency of expression of the transgene. A tissue-specific regulatory sequence(s) can be operably linked to the transgene to direct expression of the polypeptide of the invention to particular cells. Methods for generating transgenic animals via embryo manipulation and microinjection, particularly animals such as mice, have become conventional in the art and are described, for example, in U.S. Pat. Nos. 4,736,866 and 4,870,009, U.S. Pat. No. 4,873,191 and in Hogan, Manipulating the Mouse Embryo, Cold Spring Harbor Laboratory Press, Cold Spring Harbor, N.Y., 1986. Similar methods are used for production of other transgenic animals. A transgenic founder animal can be identified based upon the presence of the transgene in its genome and/or expression of mRNA encoding the transgene in tissues or cells of the animals. A transgenic founder animal can then be used to breed additional animals carrying the transgene. Moreover, transgenic animals carrying the transgene can further be bred to other transgenic animals carrying other transgenes.

[0216] To create an homologous recombinant animal, a vector is prepared which contains at least a portion of a gene encoding a marker protein into which a deletion, addition or substitution has been introduced to thereby alter, e.g., functionally disrupt, the gene. In a preferred embodiment, the vector is designed such that, upon homologous recombination, the endogenous gene is functionally disrupted (i.e., no longer encodes a functional protein; also referred to as a “knock out” vector). Alternatively, the vector can be designed such that, upon homologous recombination, the endogenous gene is mutated or otherwise altered but still encodes functional protein (e.g., the upstream regulatory region can be altered to thereby alter the expression of the endogenous protein). In the homologous recombination vector, the altered portion of the gene is flanked at its 5′ and 3′ ends by additional nucleic acid of the gene to allow for homologous recombination to occur between the exogenous gene carried by the vector and an endogenous gene in an embryonic stem cell. The additional flanking nucleic acid sequences are of sufficient length for successful homologous recombination with the endogenous gene. Typically, several kilobases of flanking DNA (both at the 5′ and 3′ ends) are included in the vector (see, e.g., Thomas and Capecchi, 1987, Cell 51:503 for a description of homologous recombination vectors). The vector is introduced into an embryonic stem cell line (e.g., by electroporation) and cells in which the introduced gene has homologously recombined with the endogenous gene are selected (see, e.g., Li et al., 1992, Cell 69:915). The selected cells are then injected into a blastocyst of an animal (e.g., a mouse) to form aggregation chimeras (see, e.g., Bradley, Teratocarcinomas and Embryonic Stem Cells: A Practical Approach, Robertson, Ed., IRL, Oxford, 1987, pp. 113-152). A chimeric embryo can then be implanted into a suitable pseudopregnant female foster animal and the embryo brought to term. Progeny harboring the homologously recombined DNA in their germ cells can be used to breed animals in which all cells of the animal contain the homologously recombined DNA by germline transmission of the transgene. Methods for constructing homologous recombination vectors and homologous recombinant animals are described further in Bradley (1991) Current Opinion in Bio/Technology 2:823-829 and in PCT Publication NOS. WO 90/11354, WO 91/01140, WO 92/0968, and WO 93/04169.

[0217] In another embodiment, transgenic non-human animals can be produced which contain selected systems which allow for regulated expression of the transgene. One example of such a system is the cre/loxP recombinase system of bacteriophage P1. For a description of the cre/loxP recombinase system, see, e.g., Lakso et al. (1992) Proc. Natl. Acad. Sci. USA 89:6232-6236. Another example of a recombinase system is the FLP recombinase system of Saccharomyces cerevisiae (O'Gorman et al., 1991, Science 251:1351-1355). If a cre/loxP recombinase system is used to regulate expression of the transgene, animals containing transgenes encoding both the Cre recombinase and a selected protein are required. Such animals can be provided through the construction of “double” transgenic animals, e.g., by mating two transgenic animals, one containing a transgene encoding a selected protein and the other containing a transgene encoding a recombinase.

[0218] Clones of the non-human transgenic animals described herein can also be produced according to the methods described in Wilmut et al. (1997) Nature 385:810-813 and PCT Publication NOS. WO 97/07668 and WO 97/07669.

### IV. Pharmaceutical Compositions

[0219] The nucleic acid molecules, polypeptides, and antibodies (also referred to herein as “active compounds”) of the invention can be incorporated into pharmaceutical compositions suitable for administration. Such compositions typically comprise the nucleic acid molecule, protein, or antibody and a pharmaceutically acceptable carrier. As used herein the language “pharmaceutically acceptable carrier” is intended to include any and all solvents, dispersion media, coatings, antibacterial and antifungal agents, isotonic and absorption delaying agents, and the like, compatible with pharmaceutical administration. The use of such media and agents for pharmaceutically active substances is well known in the art. Except insofar as any conventional media or agent is incompatible with the active compound, use thereof in the compositions is contemplated. Supplementary active compounds can also be incorporated into the compositions.

[0220] The invention includes methods for preparing pharmaceutical compositions for modulating the expression or activity of a marker nucleic acid or protein. Such methods comprise formulating a pharmaceutically acceptable carrier with an agent which modulates expression or activity of a marker nucleic acid or protein. Such compositions can further include additional active agents. Thus, the invention further includes methods for preparing a pharmaceutical composition by formulating a pharmaceutically acceptable carrier with an agent which modulates expression or activity of a marker nucleic acid or protein and one or more additional active compounds.

[0221] The invention also provides methods (also referred to herein as “screening assays”) for identifying modulators, i.e., candidate or test compounds or agents (e.g., peptides, peptidomimetics, peptoids, small molecules or other drugs) which (a) bind to the marker, or (b) have a modulatory (e.g., stimulatory or inhibitory) effect on the activity of the marker or, more specifically, (c) have a modulatory effect on the interactions of the marker with one or more of its natural substrates (e.g., peptide, protein, hormone, co-factor, or nucleic acid), or (d) have a modulatory effect on the expression of the marker. Such assays typically comprise a reaction between the marker and one or more assay components. The other components may be either the test compound itself, or a combination of test compound and a natural binding partner of the marker.

[0222] The test compounds of the present invention may be obtained from any available source, including systematic libraries of natural and/or synthetic compounds. Test compounds may also be obtained by any of the numerous approaches in combinatorial library methods known in the art, including: biological libraries; peptoid libraries (libraries of molecules having the functionalities of peptides, but with a novel, non-peptide backbone which are resistant to enzymatic degradation but which nevertheless remain bioactive; see, e.g., Zuckermann et al., 1994, J. Med. Chem. 37:2678-85); spatially addressable parallel solid phase or solution phase libraries; synthetic library methods requiring deconvolution; the ‘one-bead one-compound’ library method; and synthetic library methods using affinity chromatography selection. The biological library and peptoid library approaches are limited to peptide libraries, while the other four approaches are applicable to peptide, non-peptide oligomer or small molecule libraries of compounds (Lam, 1997, Anticancer Drug Des. 12:145).

[0223] Examples of methods for the synthesis of molecular libraries can be found in the art, for example in: DeWitt et al. (1993) Proc. Natl. Acad. Sci. U.S.A. 90:6909; Erb et al. (1994) Proc. Natl. Acad. Sci. USA 91:11422; Zuckermann et al. (1994). J. Med. Chem. 37:2678; Cho et al. (1993) Science 261:1303; Carrell et al. (1994) Angew. Chem. Int. Ed. Engl. 33:2059; Carell et al. (1994) Angew. Chem. Int. Ed. Engl. 33:2061; and in Gallop et al. (1994) J. Med. Chem. 37:1233.

[0224] Libraries of compounds may be presented in solution (e.g., Houghten, 1992, Biotechniques 13:412-421), or on beads (Lam, 1991, Nature 354:82-84), chips (Fodor, 1993, Nature 364:555-556), bacteria and/or spores, (Ladner, U.S. Pat. No. 5,223,409), plasmids (Cull et al, 1992, Proc Natl Acad Sci USA 89:1865-1869) or on phage (Scott and Smith, 1990, Science 249:386-390; Devlin, 1990, Science 249:404-406; Cwirla et al, 1990, Proc. Natl. Acad. Sci. 87:6378-6382; Felici, 1991, J. Mol. Biol. 222:301-310; Ladner, supra.).

[0225] In one embodiment, the invention provides assays for screening candidate or test compounds which are substrates of a protein encoded by or corresponding to a marker or biologically active portion thereof. In another embodiment, the invention provides assays for screening candidate or test compounds which bind to a protein encoded by or corresponding to a marker or biologically active portion thereof. Determining the ability of the test compound to directly bind to a protein can be accomplished, for example, by coupling the compound with a radioisotope or enzymatic label such that binding of the compound to the marker can be determined by detecting the labeled marker compound in a complex. For example, compounds (e.g., marker substrates) can be labeled with ¹²⁵I, ³⁵S, ¹⁴C, or ³H, either directly or indirectly, and the radioisotope detected by direct counting of radioemission or by scintillation counting. Alternatively, assay components can be enzymatically labeled with, for example, horseradish peroxidase, alkaline phosphatase, or luciferase, and the enzymatic label detected by determination of conversion of an appropriate substrate to product.

[0226] In another embodiment, the invention provides assays for screening candidate or test compounds which modulate the expression of a marker or the activity of a protein encoded by or corresponding to a marker, or a biologically active portion thereof. In all likelihood, the protein encoded by or corresponding to the marker can, in vivo, interact with one or more molecules, such as but not limited to, peptides, proteins, hormones, cofactors and nucleic acids. For the purposes of this discussion, such cellular and extracellular molecules are referred to herein as “binding partners” or marker “substrate”.

[0227] One necessary embodiment of the invention in order to facilitate such screening is the use of a protein encoded by or corresponding to marker to identify the protein's natural in vivo binding partners. There are many ways to accomplish this which are known to one skilled in the art. One example is the use of the marker protein as “bait protein” in a two-hybrid assay or three-hybrid assay (see, e.g., U.S. Pat. No. 5,283,317; Zervos et al, 1993, Cell 72:223-232; Madura et al, 1993, J. Biol. Chem. 268:12046-12054; Bartel et al, 1993, Biotechniques 14:920-924; Iwabuchi et al, 1993 Oncogene 8:1693-1696; Brent WO 94/10300) in order to identify other proteins which bind to or interact with the marker (binding partners) and, therefore, are possibly involved in the natural function of the marker. Such marker binding partners are also likely to be involved in the propagation of signals by the marker protein or downstream elements of a marker protein-mediated signaling pathway. Alternatively, such marker protein binding partners may also be found to be inhibitors of the marker protein.

[0228] The two-hybrid system is based on the modular nature of most transcription factors, which consist of separable DNA-binding and activation domains. Briefly, the assay utilizes two different DNA constructs. In one construct, the gene that encodes a marker protein fused to a gene encoding the DNA binding domain of a known transcription factor (e.g., GAL-4). In the other construct, a DNA sequence, from a library of DNA sequences, that encodes an unidentified protein (“prey” or “sample”) is fused to a gene that codes for the activation domain of the known transcription factor. If the “bait” and the “prey” proteins are able to interact, in vivo, forming a marker-dependent complex, the DNA-binding and activation domains of the transcription factor are brought into close proximity. This proximity allows transcription of a reporter gene (e.g., LacZ) which is operably linked to a transcriptional regulatory site responsive to the transcription factor. Expression of the reporter gene can be readily detected and cell colonies containing the functional transcription factor can be isolated and used to obtain the cloned gene which encodes the protein which interacts with the marker protein.

[0229] In a further embodiment, assays may be devised through the use of the invention for the purpose of identifying compounds which modulate (e.g., affect either positively or negatively) interactions between a marker protein and its substrates and/or binding partners. Such compounds can include, but are not limited to, molecules such as antibodies, peptides, hormones, oligonucleotides, nucleic acids, and analogs thereof. Such compounds may also be obtained from any available source, including systematic libraries of natural and/or synthetic compounds. The preferred assay components for use in this embodiment is an prostate cancer marker protein identified herein, the known binding partner and/or substrate of same, and the test compound. Test compounds can be supplied from any source.

[0230] The basic principle of the assay systems used to identify compounds that interfere with the interaction between the marker protein and its binding partner involves preparing a reaction mixture containing the marker protein and its binding partner under conditions and for a time sufficient to allow the two products to interact and bind, thus forming a complex. In order to test an agent for inhibitory activity, the reaction mixture is prepared in the presence and absence of the test compound. The test compound can be initially included in the reaction mixture, or can be added at a time subsequent to the addition of the marker protein and its binding partner. Control reaction mixtures are incubated without the test compound or with a placebo. The formation of any complexes between the marker protein and its binding partner is then detected. The formation of a complex in the control reaction, but less or no such formation in the reaction mixture containing the test compound, indicates that the compound interferes with the interaction of the marker protein and its binding partner. Conversely, the formation of more complex in the presence of compound than in the control reaction indicates that the compound may enhance interaction of the marker protein and its binding partner.

[0231] The assay for compounds that interfere with the interaction of the marker protein with its binding partner may be conducted in a heterogeneous or homogeneous format. Heterogeneous assays involve anchoring either the marker protein or its binding partner onto a solid phase and detecting complexes anchored to the solid phase at the end of the reaction. In homogeneous assays, the entire reaction is carried out in a liquid phase. In either approach, the order of addition of reactants can be varied to obtain different information about the compounds being tested: For example, test compounds that interfere with the interaction between the marker proteins and the binding partners (e.g., by competition) can be identified by conducting the reaction in the presence of the test substance, i.e., by adding the test substance to the reaction mixture prior to or simultaneously with the marker and its interactive binding partner. Alternatively, test compounds that disrupt preformed complexes, e.g., compounds with higher binding constants that displace one of the components from the complex, can be tested by adding the test compound to the reaction mixture after complexes have been formed. The various formats are briefly described below.

[0232] In a heterogeneous assay system, either the marker protein or its binding partner is anchored onto a solid surface or matrix, while the other corresponding non-anchored component may be labeled, either directly or indirectly. In practice, microtitre plates are often utilized for this approach. The anchored species can be immobilized by a number of methods, either non-covalent or covalent, that are typically well known to one who practices the art. Non-covalent attachment can often be accomplished simply by coating the solid surface with a solution of the marker protein or its binding partner and drying. Alternatively, an immobilized antibody specific for the assay component to be anchored can be used for this purpose. Such surfaces can often be prepared in advance and stored.

[0233] In related embodiments, a fusion protein can be provided which adds a domain that allows one or both of the assay components to be anchored to a matrix. For example, glutathione-S-transferase/marker fusion proteins or glutathione-S-transferase/binding partner can be adsorbed onto glutathione sepharose beads (Sigma Chemical, St. Louis, Mo.) or glutathione derivatized microtiter plates, which are then combined with the test compound or the test compound and either the non-adsorbed marker or its binding partner, and the mixture incubated under conditions conducive to complex formation (e.g., physiological conditions). Following incubation, the beads or microtiter plate wells are washed to remove any unbound assay components, the immobilized complex assessed either directly or indirectly, for example, as described above. Alternatively, the complexes can be dissociated from the matrix, and the level of marker binding or activity determined using standard techniques.

[0234] Other techniques for immobilizing proteins on matrices can also be used in the screening assays of the invention. For example, either a marker protein or a marker protein binding partner can be immobilized utilizing conjugation of biotin and streptavidin. Biotinylated marker protein or target molecules can be prepared from biotin-NHS (N-hydroxy-succinimide) using techniques known in the art (e.g., biotinylation kit, Pierce Chemicals, Rockford, Ill.), and immobilized in the wells of streptavidin-coated 96 well plates (Pierce Chemical). In certain embodiments, the protein-immobilized surfaces can be prepared in advance and stored.

[0235] In order to conduct the assay, the corresponding partner of the immobilized assay component is exposed to the coated surface with or without the test compound. After the reaction is complete, unreacted assay components are removed (e.g., by washing) and any complexes formed will remain immobilized on the solid surface. The detection of complexes anchored on the solid surface can be accomplished in a number of ways. Where the non-immobilized component is pre-labeled, the detection of label immobilized on the surface indicates that complexes were formed. Where the non-immobilized component is not pre-labeled, an indirect label can be used to detect complexes anchored on the surface; e.g., using a labeled antibody specific for the initially non-immobilized species (the antibody, in turn, can be directly labeled or indirectly labeled with, e.g., a labeled anti-Ig antibody). Depending upon the order of addition of reaction components, test compounds which modulate (inhibit or enhance) complex formation or which disrupt preformed complexes can be detected.

[0236] In an alternate embodiment of the invention, a homogeneous assay may be used. This is typically a reaction, analogous to those mentioned above, which is conducted in a liquid phase in the presence or absence of the test compound. The formed complexes are then separated from unreacted components, and the amount of complex formed is determined. As mentioned for heterogeneous assay systems, the order of addition of reactants to the liquid phase can yield information about which test compounds modulate (inhibit or enhance) complex formation and which disrupt preformed complexes.

[0237] In such a homogeneous assay, the reaction products may be separated from unreacted assay components by any of a number of standard techniques, including but not limited to: differential centrifugation, chromatography, electrophoresis and immunoprecipitation. In differential centrifugation, complexes of molecules may be separated from uncomplexed molecules through a series of centrifugal steps, due to the different sedimentation equilibria of complexes based on their different sizes and densities (see, for example, Rivas, G., and Minton, A. P., Trends Biochem Sci 1993 Aug;18(8):284-7). Standard chromatographic techniques may also be utilized to separate complexed molecules from uncomplexed ones. For example, gel filtration chromatography separates molecules based on size, and through the utilization of an appropriate gel filtration resin in a column format, for example, the relatively larger complex may be separated from the relatively smaller uncomplexed components. Similarly, the relatively different charge properties of the complex as compared to the uncomplexed molecules may be exploited to differentially separate the complex from the remaining individual reactants, for example through the use of ion-exchange chromatography resins. Such resins and chromatographic techniques are well known to one skilled in the art (see, e.g., Heegaard, 1998, J Mol. Recognit. 11:141-148; Hage and Tweed, 1997, J. Chromatogr. B. Biomed. Sci. Appl., 699:499-525). Gel electrophoresis may also be employed to separate complexed molecules from unbound species (see, e.g., Ausubel et al (eds.), In: Current Protocols in Molecular Biology, J. Wiley & Sons, New York. 1999). In this technique, protein or nucleic acid complexes are separated based on size or charge, for example. In order to maintain the binding interaction during the electrophoretic process, nondenaturing gels in the absence of reducing agent are typically preferred, but conditions appropriate to the particular interactants will be well known to one skilled in the art. Immunoprecipitation is another common technique utilized for the isolation of a protein-protein complex from solution (see, e.g., Ausubel et al (eds.), In: Current Protocols in Molecular Biology, J. Wiley & Sons, New York. 1999). In this technique, all proteins binding to an antibody specific to one of the binding molecules are precipitated from solution by conjugating the antibody to a polymer bead that may be readily collected by centrifugation. The bound assay components are released from the beads (through a specific proteolysis event or other technique well known in the art which will not disturb the protein-protein interaction in the complex), and a second immunoprecipitation step is performed, this time utilizing antibodies specific for the correspondingly different interacting assay component. In this manner, only formed complexes should remain attached to the beads. Variations in complex formation in both the presence and the absence of a test compound can be compared, thus offering information about the ability of the compound to modulate interactions between the marker protein and its binding partner.

[0238] Also within the scope of the present invention are methods for direct detection of interactions between the marker protein and its natural binding partner and/or a test compound in a homogeneous or heterogeneous assay system without further sample manipulation. For example, the technique of fluorescence energy transfer may be utilized (see, e.g., Lakowicz et al, U.S. Pat. No. 5,631,169; Stavrianopoulos et al, U.S. Pat. No. 4,868,103). Generally, this technique involves the addition of a fluorophore label on a first ‘donor’ molecule (e.g., marker or test compound) such that its emitted fluorescent energy will be absorbed by a fluorescent label on a second, ‘acceptor’ molecule (e.g., marker or test compound), which in turn is able to fluoresce due to the absorbed energy. Alternately, the ‘donor’ protein molecule may simply utilize the natural fluorescent energy of tryptophan residues. Labels are chosen that emit different wavelengths of light, such that the ‘acceptor’ molecule label may be differentiated from that of the ‘donor’. Since the efficiency of energy transfer between the labels is related to the distance separating the molecules, spatial relationships between the molecules can be assessed. In a situation in which binding occurs between the molecules, the fluorescent emission of the ‘acceptor’ molecule label in the assay should be maximal. An FET binding event can be conveniently measured through standard fluorometric detection means well known in the art (e.g., using a fluorimeter). A test substance which either enhances or hinders participation of one of the species in the preformed complex will result in the generation of a signal variant to that of background. In this way, test substances that modulate interactions between a marker and its binding partner can be identified in controlled assays.

[0239] In another embodiment, modulators of marker expression are identified in a method wherein a cell is contacted with a candidate compound and the expression of marker mRNA or protein in the cell, is determined. The level of expression of marker mRNA or protein in the presence of the candidate compound is compared to the level of expression of marker mRNA or protein in the absence of the candidate compound. The candidate compound can then be identified as a modulator of marker expression based on this comparison. For example, when expression of marker mRNA or protein is greater (statistically significantly greater) in the presence of the candidate compound than in its absence, the candidate compound is identified as a stimulator of marker mRNA or protein expression. Conversely, when expression of marker mRNA or protein is less (statistically significantly less) in the presence of the candidate compound than in its absence, the candidate compound is identified as an inhibitor of marker mRNA or protein expression. The level of marker mRNA or protein expression in the cells can be determined by methods described herein for detecting marker mRNA or protein.

[0240] In another aspect, the invention pertains to a combination of two or more of the assays described herein. For example, a modulating agent can be identified using a cell-based or a cell free assay, and the ability of the agent to modulate the activity of a marker protein can be further confirmed in vivo, e.g., in a whole animal model for cellular transformation and/or tumorigenesis.

[0241] This invention further pertains to novel agents identified by the above-described screening assays. Accordingly, it is within the scope of this invention to further use an agent identified as described herein in an appropriate animal model. For example, an agent identified as described herein (e.g., a marker modulating agent, an antisense marker nucleic acid molecule, a marker-specific antibody, or a marker-binding partner) can be used in an animal model to determine the efficacy, toxicity, or side effects of treatment with such an agent. Alternatively, an agent identified as described herein can be used in an animal model to determine the mechanism of action of such an agent. Furthermore, this invention pertains to uses of novel agents identified by the above-described screening assays for treatments as described herein.

[0242] It is understood that appropriate doses of small molecule agents and protein or polypeptide agents depends upon a number of factors within the knowledge of the ordinarily skilled physician, veterinarian, or researcher. The dose(s) of these agents will vary, for example, depending upon the identity, size, and condition of the subject or sample being treated, further depending upon the route by which the composition is to be administered, if applicable, and the effect which the practitioner desires the agent to have upon the nucleic acid or polypeptide of the invention. Exemplary doses of a small molecule include milligram or microgram amounts per kilogram of subject or sample weight (e.g. about 1 microgram per kilogram to about 500 milligrams per kilogram, about 100 micrograms per kilogram to about 5 milligrams per kilogram, or about 1 microgram per kilogram to about 50 micrograms per kilogram). Exemplary doses of a protein or polypeptide include gram, milligram or microgram amounts per kilogram of subject or sample weight (e.g. about 1 microgram per kilogram to about 5 grams per kilogram, about 100 micrograms per kilogram to about 500 milligrams per kilogram, or about 1 milligram per kilogram to about 50 milligrams per kilogram). It is furthermore understood that appropriate doses of one of these agents depend upon the potency of the agent with respect to the expression or activity to be modulated. Such appropriate doses can be determined using the assays described herein. When one or more of these agents is to be administered to an animal (e.g. a human) in order to modulate expression or activity of a polypeptide or nucleic acid of the invention, a physician, veterinarian, or researcher can, for example, prescribe a relatively low dose at first, subsequently increasing the dose until an appropriate response is obtained. In addition, it is understood that the specific dose level for any particular animal subject will depend upon a variety of factors including the activity of the specific agent employed, the age, body weight, general health, gender, and diet of the subject, the time of administration, the route of administration, the rate of excretion, any drug combination, and the degree of expression or activity to be modulated.

[0243] A pharmaceutical composition of the invention is formulated to be compatible with its intended route of administration. Examples of routes of administration include parenteral, e.g., intravenous, intradermal, subcutaneous, oral (e.g., inhalation), transdermal (topical), transmucosal, and rectal administration. Solutions or suspensions used for parenteral, intradermal, or subcutaneous application can include the following components: a sterile diluent such as water for injection, saline solution, fixed oils, polyethylene glycols, glycerine, propylene glycol or other synthetic solvents; antibacterial agents such as benzyl alcohol or methyl parabens; antioxidants such as ascorbic acid or sodium bisulfite; chelating agents such as ethylenediamine-tetraacetic acid; buffers such as acetates, citrates or phosphates and agents for the adjustment of tonicity such as sodium chloride or dextrose. pH can be adjusted with acids or bases, such as hydrochloric acid or sodium hydroxide. The parenteral preparation can be enclosed in ampules, disposable syringes or multiple dose vials made of glass or plastic.

[0244] Pharmaceutical compositions suitable for injectable use include sterile aqueous solutions (where water soluble) or dispersions and sterile powders for the extemporaneous preparation of sterile injectable solutions or dispersions. For intravenous administration, suitable carriers include physiological saline, bacteriostatic water, Cremophor EL (BASF; Parsippany, N.J.) or phosphate buffered saline (PBS). In all cases, the composition must be sterile and should be fluid to the extent that easy syringability exists. It must be stable under the conditions of manufacture and storage and must be preserved against the contaminating action of microorganisms such as bacteria and fungi. The carrier can be a solvent or dispersion medium containing, for example, water, ethanol, polyol (for example, glycerol, propylene glycol, and liquid polyethylene glycol, and the like), and suitable mixtures thereof. The proper fluidity can be maintained, for example, by the use of a coating such as lecithin, by the maintenance of the required particle size in the case of dispersion and by the use of surfactants. Prevention of the action of microorganisms can be achieved by various antibacterial and antifungal agents, for example, parabens, chlorobutanol, phenol, ascorbic acid, thimerosal, and the like. In many cases, it will be preferable to include isotonic agents, for example, sugars, polyalcohols such as mannitol, sorbitol, or sodium chloride in the composition. Prolonged absorption of the injectable compositions can be brought about by including in the composition an agent which delays absorption, for example, aluminum monostearate and gelatin.

[0245] Sterile injectable solutions can be prepared by incorporating the active compound (e.g., a polypeptide or antibody) in the required amount in an appropriate solvent with one or a combination of ingredients enumerated above, as required, followed by filtered sterilization. Generally, dispersions are prepared by incorporating the active compound into a sterile vehicle which contains a basic dispersion medium, and then incorporating the required other ingredients from those enumerated above. In the case of sterile powders for the preparation of sterile injectable solutions, the preferred methods of preparation are vacuum drying and freeze-drying which yields a powder of the active ingredient plus any additional desired ingredient from a previously sterile-filtered solution thereof.

[0246] Oral compositions generally include an inert diluent or an edible carrier. They can be enclosed in gelatin capsules or compressed into tablets. For the purpose of oral therapeutic administration, the active compound can be incorporated with excipients and used in the form of tablets, troches, or capsules. Oral compositions can also be prepared using a fluid carrier for use as a mouthwash, wherein the compound in the fluid carrier is applied orally and swished and expectorated or swallowed.

[0247] Pharmaceutically compatible binding agents, and/or adjuvant materials can be included as part of the composition. The tablets, pills, capsules, troches, and the like can contain any of the following ingredients, or compounds of a similar nature: a binder such as microcrystalline cellulose, gum tragacanth or gelatin; an excipient such as starch or lactose, a disintegrating agent such as alginic acid, Primogel, or corn starch; a lubricant such as magnesium stearate or Sterotes; a glidant such as colloidal silicon dioxide; a sweetening agent such as sucrose or saccharin; or a flavoring agent such as peppermint, methyl salicylate, or orange flavoring.

[0248] For administration by inhalation, the compounds are delivered in the form of an aerosol spray from a pressurized container or dispenser which contains a suitable propellant, e.g., a gas such as carbon dioxide, or a nebulizer.

[0249] Systemic administration can also be by transmucosal or transdermal means. For transmucosal or transdermal administration, penetrants appropriate to the barrier to be permeated are used in the formulation. Such penetrants are generally known in the art, and include, for example, for transmucosal administration, detergents, bile salts, and fusidic acid derivatives. Transmucosal administration can be accomplished through the use of nasal sprays or suppositories. For transdermal administration, the active compounds are formulated into ointments, salves, gels, or creams as generally known in the art.

[0250] The compounds can also be prepared in the form of suppositories (e.g., with conventional suppository bases such as cocoa butter and other glycerides) or retention enemas for rectal delivery.

[0251] In one embodiment, the active compounds are prepared with carriers that will protect the compound against rapid elimination from the body, such as a controlled release formulation, including implants and microencapsulated delivery systems. Biodegradable, biocompatible polymers can be used, such as ethylene vinyl acetate, polyanhydrides, polyglycolic acid, collagen, polyorthoesters, and polylactic acid. Methods for preparation of such formulations will be apparent to those skilled in the art. The materials can also be obtained commercially from Alza Corporation and Nova Pharmaceuticals, Inc. Liposomal suspensions (including liposomes having monoclonal antibodies incorporated therein or thereon) can also be used as pharmaceutically acceptable carriers. These can be prepared according to methods known to those skilled in the art, for example, as described in U.S. Pat. No. 4,522,811.

[0252] It is especially advantageous to formulate oral or parenteral compositions in dosage unit form for ease of administration and uniformity of dosage. Dosage unit form as used herein refers to physically discrete units suited as unitary dosages for the subject to be treated; each unit containing a predetermined quantity of active compound calculated to produce the desired therapeutic effect in association with the required pharmaceutical carrier. The specification for the dosage unit forms of the invention are dictated by and directly dependent on the unique characteristics of the active compound and the particular therapeutic effect to be achieved, and the limitations inherent in the art of compounding such an active compound for the treatment of individuals.

[0253] For antibodies, the preferred dosage is 0.1 mg/kg to 100 mg/kg of body weight (generally 10 mg/kg to 20 mg/kg). If the antibody is to act in the brain, a dosage of 50 mg/kg to 100 mg/kg is usually appropriate. Generally, partially human antibodies and fully human antibodies have a longer half-life within the human body than other antibodies. Accordingly, lower dosages and less frequent administration is often possible. Modifications such as lipidation can be used to stabilize antibodies and to enhance uptake and tissue penetration (e.g., into the prostate epithelium). A method for lipidation of antibodies is described by Cruikshank et al. (1997) J. Acquired Immune Deficiency Syndromes and Human Retrovirology 14:193.

[0254] The invention also provides vaccine compositions for the prevention and/or treatment of prostate cancer. The invention provides prostate cancer vaccine compositions in which a protein of a marker of Table 1, or a combination of proteins of the markers of Table 1, are introduced into a subject in order to stimulate an immune response against the prostate cancer. The invention also provides prostate cancer vaccine compositions in which a gene expression construct, which expresses a marker or fragment of a marker identified in Table 1, is introduced into the subject such that a protein or fragment of a protein encoded by a marker of Table 1 is produced by transfected cells in the subject at a higher than normal level and elicits an immune response.

[0255] In one embodiment, a prostate cancer vaccine is provided and employed as an immunotherapeutic agent for the prevention of prostate cancer. In another embodiment, a prostate cancer vaccine is provided and employed as an immunotherapeutic agent for the treatment of prostate cancer.

[0256] By way of example, a prostate cancer vaccine comprised of the proteins of the markers of Table 1, may be employed for the prevention and/or treatment of prostate cancer in a subject by administering the vaccine by a variety of routes, e.g., intradermally, subcutaneously, or intramuscularly. In addition, the prostate cancer vaccine can be administered together with adjuvants and/or immunomodulators to boost the activity of the vaccine and the subject's response. In one embodiment, devices and/or compositions containing the vaccine, suitable for sustained or intermittent release could be implanted in the body or topically applied thereto for the relatively slow release of such materials into the body. The prostate cancer vaccine can be introduced along with immunomodulatory compounds, which can alter the type of immune response produced in order to produce a response which will be more effective in eliminating the cancer.

[0257] In another embodiment, a prostate cancer vaccine comprised of an expression construct of the markers of Table 1, may be introduced by injection into muscle or by coating onto microprojectiles and using a device designed for the purpose to fire the projectiles at high speed into the skin. The cells of the subject will then express the protein(s) or fragments of proteins of the markers of Table 1 and induce an immune response. In addition, the prostate cancer vaccine may be introduced along with expression constructs for immunomodulatory molecules, such as cytokines, which may increase the immune response or modulate the type of immune response produced in order to produce a response which will be more effective in eliminating the cancer.

[0258] The marker nucleic acid molecules can be inserted into vectors and used as gene therapy vectors. Gene therapy vectors can be delivered to a subject by, for example, intravenous injection, local administration (U.S. Pat. No. 5,328,470), or by stereotactic injection (see, e.g., Chen et al., 1994, Proc. Natl. Acad. Sci. USA 91:3054-3057). The pharmaceutical preparation of the gene therapy vector can include the gene therapy vector in an acceptable diluent, or can comprise a slow release matrix in which the gene delivery vehicle is imbedded. Alternatively, where the complete gene delivery vector can be produced intact from recombinant cells, e.g. retroviral vectors, the pharmaceutical preparation can include one or more cells which produce the gene delivery system.

[0259] The pharmaceutical compositions can be included in a container, pack, or dispenser together with instructions for administration.

### V. Predictive Medicine

[0260] The present invention pertains to the field of predictive medicine in which diagnostic assays, prognostic assays, pharmacogenomics, and monitoring clinical trails are used for prognostic (predictive) purposes to thereby treat an individual prophylactically. Accordingly, one aspect of the present invention relates to diagnostic assays for determining the level of expression of one or more marker proteins or nucleic acids, in order to determine whether an individual is at risk of developing prostate cancer. Such assays can be used for prognostic or predictive purposes to thereby prophylactically treat an individual prior to the onset of the cancer.

[0261] Yet another aspect of the invention pertains to monitoring the influence of agents (e.g., drugs or other compounds administered either to inhibit prostate cancer or to treat or prevent any other disorder {i.e. in order to understand any prostate carcinogenic effects that such treatment may have}) on the expression or activity of a marker of the invention in clinical trials. These and other agents are described in further detail in the following sections.

### A. Diagnostic Assays

[0262] An exemplary method for detecting the presence or absence of a marker protein or nucleic acid in a biological sample involves obtaining a biological sample (e.g. a prostate-associated body fluid) from a test subject and contacting the biological sample with a compound or an agent capable of detecting the polypeptide or nucleic acid (e.g., mRNA, genomic DNA, or cDNA). The detection methods of the invention can thus be used to detect mRNA, protein, cDNA, or genomic DNA, for example, in a biological sample in vitro as well as in vivo. For example, in vitro techniques for detection of mRNA include Northern hybridizations and in situ hybridizations. In vitro techniques for detection of a marker protein include enzyme linked immunosorbent assays (ELISAs), Western blots, immunoprecipitations and immunofluorescence. In vitro techniques for detection of genomic DNA include Southern hybridizations. In vivo techniques for detection of mRNA include polymerase chain reaction (PCR), Northern hybridizations and in situ hybridizations. Furthermore, in vivo techniques for detection of a marker protein include introducing into a subject a labeled antibody directed against the protein or fragment thereof. For example, the antibody can be labeled with a radioactive marker whose presence and location in a subject can be detected by standard imaging techniques.

[0263] A general principle of such diagnostic and prognostic assays involves preparing a sample or reaction mixture that may contain a marker, and a probe, under appropriate conditions and for a time sufficient to allow the marker and probe to interact and bind, thus forming a complex that can be removed and/or detected in the reaction mixture. These assays can be conducted in a variety of ways.

[0264] For example, one method to conduct such an assay would involve anchoring the marker or probe onto a solid phase support, also referred to as a substrate, and detecting target marker/probe complexes anchored on the solid phase at the end of the reaction. In one embodiment of such a method, a sample from a subject, which is to be assayed for presence and/or concentration of marker, can be anchored onto a carrier or solid phase support. In another embodiment, the reverse situation is possible, in which the probe can be anchored to a solid phase and a sample from a subject can be allowed to react as an unanchored component of the assay.

[0265] There are many established methods for anchoring assay components to a solid phase. These include, without limitation, marker or probe molecules which are immobilized through conjugation of biotin and streptavidin. Such biotinylated assay components can be prepared from biotin-NHS (N-hydroxy-succinimide) using techniques known in the art (e.g., biotinylation kit, Pierce Chemicals, Rockford, Ill.), and immobilized in the wells of streptavidin-coated 96 well plates (Pierce Chemical). In certain embodiments, the surfaces with immobilized assay components can be prepared in advance and stored.

[0266] Other suitable carriers or solid phase supports for such assays include any material capable of binding the class of molecule to which the marker or probe belongs. Well-known supports or carriers include, but are not limited to, glass, polystyrene, nylon, polypropylene, nylon, polyethylene, dextran, amylases, natural and modified celluloses, polyacrylamides, gabbros, and magnetite.

[0267] In order to conduct assays with the above mentioned approaches, the non-immobilized component is added to the solid phase upon which the second component is anchored. After the reaction is complete, uncomplexed components may be removed (e.g., by washing) under conditions such that any complexes formed will remain immobilized upon the solid phase. The detection of marker/probe complexes anchored to the solid phase can be accomplished in a number of methods outlined herein.

[0268] In a preferred embodiment, the probe, when it is the unanchored assay component, can be labeled for the purpose of detection and readout of the assay, either directly or indirectly, with detectable labels discussed herein and which are well-known to one skilled in the art.

[0269] It is also possible to directly detect marker/probe complex formation without further manipulation or labeling of either component (marker or probe), for example by utilizing the technique of fluorescence energy transfer (see, for example, Lakowicz et al., U.S. Pat. No. 5,631,169; Stavrianopoulos, et al., U.S. Pat. No. 4,868,103). A fluorophore label on the first, ‘donor’ molecule is selected such that, upon excitation with incident light of appropriate wavelength, its emitted fluorescent energy will be absorbed by a fluorescent label on a second ‘acceptor’ molecule, which in turn is able to fluoresce due to the absorbed energy. Alternately, the ‘donor’ protein molecule may simply utilize the natural fluorescent energy of tryptophan residues. Labels are chosen that emit different wavelengths of light, such that the ‘acceptor’ molecule label may be differentiated from that of the ‘donor’. Since the efficiency of energy transfer between the labels is related to the distance separating the molecules, spatial relationships between the molecules can be assessed. In a situation in which binding occurs between the molecules, the fluorescent emission of the ‘acceptor’ molecule label in the assay should be maximal. An FET binding event can be conveniently measured through standard fluorometric detection means well known in the art (e.g., using a fluorimeter).

[0270] In another embodiment, determination of the ability of a probe to recognize a marker can be accomplished without labeling either assay component (probe or marker) by utilizing a technology such as real-time Biomolecular Interaction Analysis (BIA) (see, e.g., Sjolander, S. and Urbaniczky, C., 1991, Anal. Chem. 63:2338-2345 and Szabo et al., 1995, Curr. Opin. Struct. Biol. 5:699-705). As used herein, “BIA” or “surface plasmon resonance” is a technology for studying biospecific interactions in real time, without labeling any of the interactants (e.g., BIAcore). Changes in the mass at the binding surface (indicative of a binding event) result in alterations of the refractive index of light near the surface (the optical phenomenon of surface plasmon resonance (SPR)), resulting in a detectable signal which can be used as an indication of real-time reactions between biological molecules.

[0271] Alternatively, in another embodiment, analogous diagnostic and prognostic assays can be conducted with marker and probe as solutes in a liquid phase. In such an assay, the complexed marker and probe are separated from uncomplexed components by any of a number of standard techniques, including but not limited to: differential centrifugation, chromatography, electrophoresis and immunoprecipitation. In differential centrifugation, marker/probe complexes may be separated from uncomplexed assay components through a series of centrifugal steps, due to the different sedimentation equilibria of complexes based on their different sizes and densities (see, for example, Rivas, G., and Minton, A. P., 1993, Trends Biochem Sci. 18(8):284-7). Standard chromatographic techniques may also be utilized to separate complexed molecules from uncomplexed ones. For example, gel filtration chromatography separates molecules based on size, and through the utilization of an appropriate gel filtration resin in a column format, for example, the relatively larger complex may be separated from the relatively smaller uncomplexed components. Similarly, the relatively different charge properties of the marker/probe complex as compared to the uncomplexed components may be exploited to differentiate the complex from uncomplexed components, for example through the utilization of ion-exchange chromatography resins. Such resins and chromatographic techniques are well known to one skilled in the art (see, e.g., Heegaard, N. H., 1998, J. Mol. Recognit. Winter 11(1-6):141-8; Hage, D. S., and Tweed, S. A. J. Chromatogr B Biomed Sci Appl 1997 Oct 10;699(1-2):499-525). Gel electrophoresis may also be employed to separate complexed assay components from unbound components (see, e.g., Ausubel et al., ed., Current Protocols in Molecular Biology, John Wiley & Sons, New York, 1987-1999). In this technique, protein or nucleic acid complexes are separated based on size or charge, for example. In order to maintain the binding interaction during the electrophoretic process, non-denaturing gel matrix materials and conditions in the absence of reducing agent are typically preferred. Appropriate conditions to the particular assay and components thereof will be well known to one skilled in the art.

[0272] In a particular embodiment, the level of marker mRNA can be determined both by in situ and by in vitro formats in a biological sample using methods known in the art. The term “biological sample” is intended to include tissues, cells, biological fluids and isolates thereof, isolated from a subject, as well as tissues, cells and fluids present within a subject. Many expression detection methods use isolated RNA. For in vitro methods, any RNA isolation technique that does not select against the isolation of mRNA can be utilized for the purification of RNA from prostate cells (see, e.g., Ausubel et al., ed., Current Protocols in Molecular Biology, John Wiley & Sons, New York 1987-1999). Additionally, large numbers of tissue samples can readily be processed using techniques well known to those of skill in the art, such as, for example, the single-step RNA isolation process of Chomczynski (1989, U.S. Pat. No. 4,843,155).

[0273] The isolated mRNA can be used in hybridization or amplification assays that include, but are not limited to, Southern or Northern analyses, polymerase chain reaction analyses and probe arrays. One preferred diagnostic method for the detection of mRNA levels involves contacting the isolated mRNA with a nucleic acid molecule (probe) that can hybridize to the mRNA encoded by the gene being detected. The nucleic acid probe can be, for example, a full-length cDNA, or a portion thereof, such as an oligonucleotide of at least 7, 15, 30, 50, 100, 250 or 500 nucleotides in length and sufficient to specifically hybridize under stringent conditions to a mRNA or genomic DNA encoding a marker of the present invention. Other suitable probes for use in the diagnostic assays of the invention are described herein. Hybridization of an mRNA with the probe indicates that the marker in question is being expressed.

[0274] In one format, the mRNA is immobilized on a solid surface and contacted with a probe, for example by running the isolated mRNA on an agarose gel and transferring the mRNA from the gel to a membrane, such as nitrocellulose. In an alternative format, the probe(s) are immobilized on a solid surface and the mRNA is contacted with the probe(s), for example, in an Affymetrix gene chip array. A skilled artisan can readily adapt known mRNA detection methods for use in detecting the level of mRNA encoded by the markers of the present invention.

[0275] An alternative method for determining the level of mRNA marker in a sample involves the process of nucleic acid amplification, e.g., by RT-PCR (the experimental embodiment set forth in Mullis, 1987, U.S. Pat. No. 4,683,202), ligase chain reaction (Barany, 1991, Proc. Natl. Acad. Sci. USA, 88:189-193), self sustained sequence replication (Guatelli et al., 1990, Proc. Natl. Acad. Sci. USA 87:1874-1878), transcriptional amplification system (Kwoh et al., 1989, Proc. Natl. Acad. Sci. USA 86:1173-1177), Q-Beta Replicase (Lizardi et al., 1988, Bio/Technology 6:1197), rolling circle replication (Lizardi et al., U.S. Pat. No. 5,854,033) or any other nucleic acid amplification method, followed by the detection of the amplified molecules using techniques well known to those of skill in the art. These detection schemes are especially useful for the detection of nucleic acid molecules if such molecules are present in very low numbers. As used herein, amplification primers are defined as being a pair of nucleic acid molecules that can anneal to 5′ or 3′ regions of a gene (plus and minus strands, respectively, or vice-versa) and contain a short region in between. In general, amplification primers are from about 10 to 30 nucleotides in length and flank a region from about 50 to 200 nucleotides in length. Under appropriate conditions and with appropriate reagents, such primers permit the amplification of a nucleic acid molecule comprising the nucleotide sequence flanked by the primers.

[0276] For in situ methods, mRNA does not need to be isolated from the prostate cells prior to detection. In such methods, a cell or tissue sample is prepared/processed using known histological methods. The sample is then immobilized on a support, typically a glass slide, and then contacted with a probe that can hybridize to mRNA that encodes the marker.

[0277] As an alternative to making determinations based on the absolute expression level of the marker, determinations may be based on the normalized expression level of the marker. Expression levels are normalized by correcting the absolute expression level of a marker by comparing its expression to the expression of a gene that is not a marker, e.g., a housekeeping gene that is constitutively expressed. Suitable genes for normalization include housekeeping genes such as the actin gene, or epithelial cell-specific genes. This normalization allows the comparison of the expression level in one sample, e.g., a patient sample, to another sample, e.g., a non-prostate cancer sample, or between samples from different sources.

[0278] Alternatively, the expression level can be provided as a relative expression level. To determine a relative expression level of a marker, the level of expression of the marker is determined for 10 or more samples of normal versus cancer cell isolates, preferably 50 or more samples, prior to the determination of the expression level for the sample in question. The mean expression level of each of the genes assayed in the larger number of samples is determined and this is used as a baseline expression level for the marker. The expression level of the marker determined for the test sample (absolute level of expression) is then divided by the mean expression value obtained for that marker. This provides a relative expression level.

[0279] Preferably, the samples used in the baseline determination will be from prostate cancer or from non-prostate cancer cells of prostate tissue. The choice of the cell source is dependent on the use of the relative expression level. Using expression found in normal tissues as a mean expression score aids in validating whether the marker assayed is prostate specific (versus normal cells). In addition, as more data is accumulated, the mean expression value can be revised, providing improved relative expression values based on accumulated data. Expression data from prostate cells provides a means for grading the severity of the prostate cancer state.

[0280] In another embodiment of the present invention, a marker protein is detected. A preferred agent for detecting marker protein of the invention is an antibody capable of binding to such a protein or a fragment thereof, preferably an antibody with a detectable label. Antibodies can be polyclonal, or more preferably, monoclonal. An intact antibody, or a fragment or derivative thereof (e.g., Fab or F(ab′)₂) can be used. The term “labeled”, with regard to the probe or antibody, is intended to encompass direct labeling of the probe or antibody by coupling (i.e., physically linking) a detectable substance to the probe or antibody, as well as indirect labeling of the probe or antibody by reactivity with another reagent that is directly labeled. Examples of indirect labeling include detection of a primary antibody using a fluorescently labeled secondary antibody and end-labeling of a DNA probe with biotin such that it can be detected with fluorescently labeled streptavidin.

[0281] Proteins from prostate cells can be isolated using techniques that are well known to those of skill in the art. The protein isolation methods employed can, for example, be such as those described in Harlow and Lane (Harlow and Lane, 1988, Antibodies: A Laboratory Manual, Cold Spring Harbor Laboratory Press, Cold Spring Harbor, N.Y.).

[0282] A variety of formats can be employed to determine whether a sample contains a protein that binds to a given antibody. Examples of such formats include, but are not limited to, enzyme immunoassay (EIA), radioimmunoassay (RIA), Western blot analysis and enzyme linked immunoabsorbant assay (ELISA). A skilled artisan can readily adapt known protein/antibody detection methods for use in determining whether prostate cells express a marker of the present invention.

[0283] In one format, antibodies, or antibody fragments or derivatives, can be used in methods such as Western blots or immunofluorescence techniques to detect the expressed proteins. In such uses, it is generally preferable to immobilize either the antibody or proteins on a solid support. Suitable solid phase supports or carriers include any support capable of binding an antigen or an antibody. Well-known supports or carriers include glass, polystyrene, polypropylene, polyethylene, dextran, nylon, amylases, natural and modified celluloses, polyacrylamides, gabbros, and magnetite.

[0284] One skilled in the art will know many other suitable carriers for binding antibody or antigen, and will be able to adapt such support for use with the present invention. For example, protein isolated from prostate cells can be run on a polyacrylamide gel electrophoresis and immobilized onto a solid phase support such as nitrocellulose. The support can then be washed with suitable buffers followed by treatment with the detectably labeled antibody. The solid phase support can then be washed with the buffer a second time to remove unbound antibody. The amount of bound label on the solid support can then be detected by conventional means.

[0285] The invention also encompasses kits for detecting the presence of a marker protein or nucleic acid in a biological sample. Such kits can be used to determine if a subject is suffering from or is at increased risk of developing prostate cancer. For example, the kit can comprise a labeled compound or agent capable of detecting a marker protein or nucleic acid in a biological sample and means for determining the amount of the protein or mRNA in the sample (e.g., an antibody which binds the protein or a fragment thereof, or an oligonucleotide probe which binds to DNA or mRNA encoding the protein). Kits can also include instructions for interpreting the results obtained using the kit.

[0286] For antibody-based kits, the kit can comprise, for example: (1) a first antibody (e.g., attached to a solid support) which binds to a marker protein; and, optionally, (2) a second, different antibody which binds to either the protein or the first antibody and is conjugated to a detectable label.

[0287] For oligonucleotide-based kits, the kit can comprise, for example: (1) an oligonucleotide, e.g., a detectably labeled oligonucleotide, which hybridizes to a nucleic acid sequence encoding a marker protein or (2) a pair of primers useful for amplifying a marker nucleic acid molecule. The kit can also comprise, e.g., a buffering agent, a preservative, or a protein stabilizing agent. The kit can further comprise components necessary for detecting the detectable label (e.g., an enzyme or a substrate). The kit can also contain a control sample or a series of control samples which can be assayed and compared to the test sample. Each component of the kit can be enclosed within an individual container and all of the various containers can be within a single package, along with instructions for interpreting the results of the assays performed using the kit.

### B. Pharmacogenomics

[0288] The markers of the invention are also useful as pharmacogenomic markers. As used herein, a “pharmacogenomic marker” is an objective biochemical marker whose expression level correlates with a specific clinical drug response or susceptibility in a patient (see, e.g., McLeod et al. (1999) Eur. J. Cancer 35(12): 1650-1652). The presence or quantity of the pharmacogenomic marker expression is related to the predicted response of the patient and more particularly the patient's tumor to therapy with a specific drug or class of drugs. By assessing the presence or quantity of the expression of one or more pharmacogenomic markers in a patient, a drug therapy which is most appropriate for the patient, or which is predicted to have a greater degree of success, may be selected. For example, based on the presence or quantity of RNA or protein encoded by specific tumor markers in a patient, a drug or course of treatment may be selected that is optimized for the treatment of the specific tumor likely to be present in the patient. The use of pharmacogenomic markers therefore permits selecting or designing the most appropriate treatment for each cancer patient without trying different drugs or regimes.

[0289] Another aspect of pharmacogenomics deals with genetic conditions that alters the way the body acts on drugs. These pharmacogenetic conditions can occur either as rare defects or as polymorphisms. For example, glucose-6-phosphate dehydrogenase (G6PD) deficiency is a common inherited enzymopathy in which the main clinical complication is hemolysis after ingestion of oxidant drugs (anti-malarials, sulfonamides, analgesics, nitrofurans) and consumption of fava beans.

[0290] As an illustrative embodiment, the activity of drug metabolizing enzymes is a major determinant of both the intensity and duration of drug action. The discovery of genetic polymorphisms of drug metabolizing enzymes (e.g., N-acetyltransferase 2 (NAT 2) and cytochrome P450 enzymes CYP2D6 and CYP2C19) has provided an explanation as to why some patients do not obtain the expected drug effects or show exaggerated drug response and serious toxicity after taking the standard and safe dose of a drug. These polymorphisms are expressed in two phenotypes in the population, the extensive metabolizer (EM) and poor metabolizer (PM). The prevalence of PM is different among different populations. For example, the gene coding for CYP2D6 is highly polymorphic and several mutations have been identified in PM, which all lead to the absence of functional CYP2D6. Poor metabolizers of CYP2D6 and CYP2C 19 quite frequently experience exaggerated drug response and side effects when they receive standard doses. If a metabolite is the active therapeutic moiety, a PM will show no therapeutic response, as demonstrated for the analgesic effect of codeine mediated by its CYP2D6-formed metabolite morphine. The other extreme are the so called ultra-rapid metabolizers who do not respond to standard doses. Recently, the molecular basis of ultra-rapid metabolism has been identified to be due to CYP2D6 gene amplification.

[0291] Thus, the level of expression of a marker of the invention in an individual can be determined to thereby select appropriate agent(s) for therapeutic or prophylactic treatment of the individual. In addition, pharmacogenetic studies can be used to apply genotyping of polymorphic alleles encoding drug-metabolizing enzymes to the identification of an individual's drug responsiveness phenotype. This knowledge, when applied to dosing or drug selection, can avoid adverse reactions or therapeutic failure and thus enhance therapeutic or prophylactic efficiency when treating a subject with a modulator of expression of a marker of the invention.

### C. Monitoring Clinical Trials

[0292] Monitoring the influence of agents (e.g., drug compounds) on the level of expression of a marker of the invention can be applied not only in basic drug screening, but also in clinical trials. For example, the effectiveness of an agent to affect marker expression can be monitored in clinical trials of subjects receiving treatment for prostate cancer. In a preferred embodiment, the present invention provides a method for monitoring the effectiveness of treatment of a subject with an agent (e.g., an agonist, antagonist, peptidomimetic, protein, peptide, nucleic acid, small molecule, or other drug candidate) comprising the steps of (i) obtaining a pre-administration sample from a subject prior to administration of the agent; (ii) detecting the level of expression of one or more selected markers of the invention in the pre-administration sample; (iii) obtaining one or more post-administration samples from the subject; (iv) detecting the level of expression of the marker(s) in the post-administration samples; (v) comparing the level of expression of the marker(s) in the pre-administration sample with the level of expression of the marker(s) in the post-administration sample or samples; and (vi) altering the administration of the agent to the subject accordingly. For example, increased expression of the marker gene(s) during the course of treatment may indicate ineffective dosage and the desirability of increasing the dosage. Conversely, decreased expression of the marker gene(s) may indicate efficacious treatment and no need to change dosage.

### D. Electronic Apparatus Readable Media and Arrays

[0293] Electronic apparatus readable media comprising a marker of the present invention is also provided. As used herein, “electronic apparatus readable media” refers to any suitable medium for storing, holding or containing data or information that can be read and accessed directly by an electronic apparatus. Such media can include, but are not limited to: magnetic storage media, such as floppy discs, hard disc storage medium, and magnetic tape; optical storage media such as compact disc; electronic storage media such as RAM, ROM, EPROM, EEPROM and the like; general hard disks and hybrids of these categories such as magnetic/optical storage media. The medium is adapted or configured for having recorded thereon a marker of the present invention.

[0294] As used herein, the term “electronic apparatus” is intended to include any suitable computing or processing apparatus or other device configured or adapted for storing data or information. Examples of electronic apparatus suitable for use with the present invention include stand-alone computing apparatus; networks, including a local area network (LAN), a wide area network (WAN) Internet, Intranet, and Extranet; electronic appliances such as a personal digital assistants (PDAs), cellular phone, pager and the like; and local and distributed processing systems.

[0295] As used herein, “recorded” refers to a process for storing or encoding information on the electronic apparatus readable medium. Those skilled in the art can readily adopt any of the presently known methods for recording information on known media to generate manufactures comprising the markers of the present invention.

[0296] A variety of software programs and formats can be used to store the marker information of the present invention on the electronic apparatus readable medium. For example, the marker nucleic acid sequence can be represented in a word processing text file, formatted in commercially-available software such as WordPerfect and MicroSoft Word, or represented in the form of an ASCII file, stored in a database application, such as DB2, Sybase, Oracle, or the like, as well as in other forms. Any number of data processor structuring formats (e.g., text file or database) may be employed in order to obtain or create a medium having recorded thereon the markers of the present invention.

[0297] By providing the markers of the invention in readable form, one can routinely access the marker sequence information for a variety of purposes. For example, one skilled in the art can use the nucleotide or amino acid sequences of the present invention in readable form to compare a target sequence or target structural motif with the sequence information stored within the data storage means. Search means are used to identify fragments or regions of the sequences of the invention which match a particular target sequence or target motif.

[0298] The present invention therefore provides a medium for holding instructions for performing a method for determining whether a subject has prostate cancer or a pre-disposition to prostate cancer, wherein the method comprises the steps of determining the presence or absence of a marker and based on the presence or absence of the marker, determining whether the subject has prostate cancer or a pre-disposition to prostate cancer and/or recommending a particular treatment for prostate cancer or pre-prostate cancer condition.

[0299] The present invention further provides in an electronic system and/or in a network, a method for determining whether a subject has prostate cancer or a pre-disposition to prostate cancer associated with a marker wherein the method comprises the steps of determining the presence or absence of the marker, and based on the presence or absence of the marker, determining whether the subject has prostate cancer or a pre-disposition to prostate cancer, and/or recommending a particular treatment for the prostate cancer or pre-prostate cancer condition. The method may further comprise the step of receiving phenotypic information associated with the subject and/or acquiring from a network phenotypic information associated with the subject.

[0300] The present invention also provides in a network, a method for determining whether a subject has prostate cancer or a pre-disposition to prostate cancer associated with a marker, said method comprising the steps of receiving information associated with the marker receiving phenotypic information associated with the subject, acquiring information from the network corresponding to the marker and/or prostate cancer, and based on one or more of the phenotypic information, the marker, and the acquired information, determining whether the subject has a prostate cancer or a pre-disposition to prostate cancer. The method may further comprise the step of recommending a particular treatment for the prostate cancer or pre-prostate cancer condition.

[0301] The present invention also provides a business method for determining whether a subject has prostate cancer or a pre-disposition to prostate cancer, said method comprising the steps of receiving information associated with the marker, receiving phenotypic information associated with the subject, acquiring information from the network corresponding to the marker and/or prostate cancer, and based on one or more of the phenotypic information, the marker, and the acquired information, determining whether the subject has prostate cancer or a pre-disposition to prostate cancer. The method may further comprise the step of recommending a particular treatment for the prostate cancer or pre-prostate cancer condition.

[0302] The invention also includes an array comprising a marker of the present invention. The array can be used to assay expression of one or more genes in the array. In one embodiment, the array can be used to assay gene expression in a tissue to ascertain tissue specificity of genes in the array. In this manner, up to about 7600 genes can be simultaneously assayed for expression. This allows a profile to be developed showing a battery of genes specifically expressed in one or more tissues.

[0303] In addition to such qualitative determination, the invention allows the quantitation of gene expression. Thus, not only tissue specificity, but also the level of expression of a battery of genes in the tissue is ascertainable. Thus, genes can be grouped on the basis of their tissue expression per se and level of expression in that tissue. This is useful, for example, in ascertaining the relationship of gene expression between or among tissues. Thus, one tissue can be perturbed and the effect on gene expression in a second tissue can be determined. In this context, the effect of one cell type on another cell type in response to a biological stimulus can be determined. Such a determination is useful, for example, to know the effect of cell-cell interaction at the level of gene expression. If an agent is administered therapeutically to treat one cell type but has an undesirable effect on another cell type, the invention provides an assay to determine the molecular basis of the undesirable effect and thus provides the opportunity to co-administer a counteracting agent or otherwise treat the undesired effect. Similarly, even within a single cell type, undesirable biological effects can be determined at the molecular level. Thus, the effects of an agent on expression of other than the target gene can be ascertained and counteracted.

[0304] In another embodiment, the array can be used to monitor the time course of expression of one or more genes in the array. This can occur in various biological contexts, as disclosed herein, for example development of prostate cancer, progression of prostate cancer, and processes, such a cellular transformation associated with prostate cancer.

[0305] The array is also useful for ascertaining the effect of the expression of a gene on the expression of other genes in the same cell or in different cells. This provides, for example, for a selection of alternate molecular targets for therapeutic intervention if the ultimate or downstream target cannot be regulated.

[0306] The array is also useful for ascertaining differential expression patterns of one or more genes in normal and abnormal cells. This provides a battery of genes that could serve as a molecular target for diagnosis or therapeutic intervention.

### E. Surrogate Markers

[0307] The markers of the invention may serve as surrogate markers for one or more disorders or disease states or for conditions leading up to disease states, and in particular, prostate cancer. As used herein, a “surrogate marker” is an objective biochemical marker which correlates with the absence or presence of a disease or disorder, or with the progression of a disease or disorder (e.g., with the presence or absence of a tumor). The presence or quantity of such markers is independent of the disease. Therefore, these markers may serve to indicate whether a particular course of treatment is effective in lessening a disease state or disorder. Surrogate markers are of particular use when the presence or extent of a disease state or disorder is difficult to assess through standard methodologies (e.g., early stage tumors), or when an assessment of disease progression is desired before a potentially dangerous clinical endpoint is reached (e.g., an assessment of cardiovascular disease may be made using cholesterol levels as a surrogate marker, and an analysis of HIV infection may be made using HIV RNA levels as a surrogate marker, well in advance of the undesirable clinical outcomes of myocardial infarction or fully-developed AIDS). Examples of the use of surrogate markers in the art include: Koomen et al. (2000) J. Mass. Spectrom. 35: 258-264; and James (1994) AIDS Treatment News Archive 209.

[0308] The markers of the invention are also useful as pharmacodynamic markers. As used herein, a “pharmacodynamic marker” is an objective biochemical marker which correlates specifically with drug effects. The presence or quantity of a pharmacodynamic marker is not related to the disease state or disorder for which the drug is being administered; therefore, the presence or quantity of the marker is indicative of the presence or activity of the drug in a subject. For example, a pharmacodynamic marker may be indicative of the concentration of the drug in a biological tissue, in that the marker is either expressed or transcribed or not expressed or transcribed in that tissue in relationship to the level of the drug. In this fashion, the distribution or uptake of the drug may be monitored by the pharmacodynamic marker. Similarly, the presence or quantity of the pharmacodynamic marker may be related to the presence or quantity of the metabolic product of a drug, such that the presence or quantity of the marker is indicative of the relative breakdown rate of the drug in vivo. Pharmacodynamic markers are of particular use in increasing the sensitivity of detection of drug effects, particularly when the drug is administered in low doses. Since even a small amount of a drug may be sufficient to activate multiple rounds of marker transcription or expression, the amplified marker may be in a quantity which is more readily detectable than the drug itself. Also, the marker may be more easily detected due to the nature of the marker itself; for example, using the methods described herein, antibodies may be employed in an immune-based detection system for a protein marker, or marker-specific radiolabeled probes may be used to detect a mRNA marker. Furthermore, the use of a pharmacodynamic marker may offer mechanism-based prediction of risk due to drug treatment beyond the range of possible direct observations. Examples of the use of pharmacodynamic markers in the art include: Matsuda et al. U.S. Pat. No. 6,033,862; Hattis et al. (1991) Env. Health Perspect. 90: 229-238; Schentag (1999) Am. J. Health-Syst. Pharm. 56 Suppl. 3: S21-S24; and Nicolau (1999) Am, J. Health-Syst. Pharm. 56 Suppl. 3: S16-S20.

### VI. Experimental Protocol

### A. Identification of Markers and Assembly of Their Sequences

[0309] The markers of the present invention were identified by transcription profiling using RNA derived from clinical samples which were chosen based on disease state, prognostic and diagnostic criteria. Frozen tissue blocks were sectioned and RNA isolated from the samples. The integrity of the RNA was evaluated, and degraded samples were not used for the experiments.

[0310] In order to identify markers particularly useful in screening for the presence of prostate cancer (“screening markers”), transcriptional profiling with two custom arrays was performed. These custom arrays consisted of 6,144 spots per membrane, including over 6,000 subtracted library clones, more than 5,000 IMAGE clones, and 200 control genes. RNA samples derived from 31 prostate tumor samples, 25 normal prostate samples, 6 benign prostatic hyperplasia (BPH) samples, 10 non-prostate tissue samples, and 7 cell line samples were used to prepare 33P-labeled cDNA probes. The labeled probes were hybridized in duplicate onto nylon membrane arrays. All of the 79 RNA samples were profiled in a series of experiments balanced for both filter and sample parameters. Clones that displayed an increase in expression in prostate tumor specimens over the corresponding average expression of non-tumor samples were selected to have their protein-encoding transcript sequences determined.

[0311] In order to identify markers involved in clinical progression, outcome prediction or metastasis of prostate cancer, transcription-profiling experiments were performed using a set of 77 RNA samples. These clinical samples were selected based on tumor stage, Gleason scores and PSA levels. The Gleason grading system is a histologic grading of the structure of prostate tissue. The Gleason patterns are graded from 1 to 5 based on the degree of glandular differentiation. The Gleason score is written as the sum of the two most prominent Gleason patterns. (Gleason, D. F., (1992) Human Pathology 23(3):273-9.) RNA (2-4 μg/sample) from 6 normal prostate, 2 normal liver, 1 normal node, 6 benign prostatic hyperplasia (BPH), 15 good clinical outcome, 14 poor clinical outcome, 4 stage TN+primary tumors, 14 stage T3NO tumors, and 15 metastasis RNA samples (which included 8 node, 3 liver and 4 bone metastatic samples) were used to prepare reverse-transcribed 33P-labeled probe. Good clinical outcome primary tumor samples were recovered from surgical prostatectomy samples of patients who had remained prostate cancer free for at least five years following surgery. Primary prostate tumor samples of Gleason scores 6 or less, and pre-surgical serum PSA levels equal to or less than 5.5 ng/ml, were also categorized as good clinical outcome samples. PSA levels of good clinical outcome patients were expected to have stayed below 0.4 ng/ml after surgery. Poor clinical outcome primary tumor samples were obtained from surgical prostatectomy samples of patients whose cancer had recurred within 3 years following surgery. Recurrence is defined as rising serum PSA levels that persist above 0.4 ng/ml and continue to rise if the patients do not receive treatment. Primary prostate tumor samples of Gleason scores greater than or equal to 8 and pre-surgical serum PSA levels greater than 10 ng/ml were also categorized as poor outcome samples. Probes were hybridized in duplicate onto nylon membrane custom arrays. The custom arrays consisted of an array of either 6,144 spots per membrane or 9,600 spots per membrane, including over 9,000 subtracted library clones, more than 5,000 IMAGE clones, and 200 control genes. Tumor progression, clinical outcome and metastasis markers listed in Table 3 were selected from this experiment if their expression levels satisfied one of the following requirements: a) the marker was elevated by at least two fold in at least 50% of the poor clinical outcome tumor samples over the good clinical outcome tumor samples; b) the marker was elevated by at least 2 fold in at least 50% of the good clinical outcome tumor samples over the poor clinical outcome tumor samples; and c) the marker/clone was elevated at least two fold in 50% of the metastatic tumor samples.

[0312] The sequence(s) derived from these selected over-expressed clones were analyzed using BLAST® (Basic Local Alignment Search Tool). The query sequence was either derived directly from the over-expressed clone or was a contiguous sequence assembly (contig) of multiple EST sequences including the EST sequence(s), derived from the selected over-expressed clone. The BLAST analysis against public and proprietary nucleotide and protein sequence databases was performed on these selected over-expressed clones. The identification of protein sequence corresponding to the clone was accomplished by obtaining with each clone one of the following: a) a match between the protein sequence and at least one EST sequence from the clone; b) a match between the nucleotide sequence for the mRNA corresponding to the protein sequence and at least one EST sequence from the clone; c) a match between the protein sequence and a manually curated assembly (contig) based on all available sequences; or d) the identification of protein sequence based on an open reading frame (ORF) contained within a manually curated assembly (contig) based on all available sequences.

### B. Summary of the Data

[0313] Tables 1-6 list the markers obtained using the foregoing protocol. The Tables list the markers which are designated with a name (“Marker”), the name the gene is commonly known by, if applicable (“Gene Name”), the sequence listing identifier of the cDNA sequence of a nucleotide transcript encoded by or corresponding to the marker (“SEQ ID NO (nts)”), the sequence listing identifier of the amino acid sequence of a protein encoded by the nucleotide transcript (“SEQ ID NO (AAs)”), and the location of the protein coding sequence within the cDNA sequence (“CDS”).

[0314] Table 1 lists all of the markers of the invention, which are over-expressed in prostate cancer cells compared to normal (i.e., non-cancerous) prostate cells and comprises markers listed in Tables 2-6. Table 2 lists markers particularly useful in screening for the presence of prostate cancer (“screening markers”). Table 3 lists markers particularly useful in assessing aggressiveness and metastatic potential of prostate cancer (“aggressiveness markers”). Table 4 lists markers particularly useful in both screening for the presence of prostate cancer as well as for assessing aggressiveness and metastatic potential of prostate cancer. Table 5 lists newly-identified nucleotide and amino acid sequences useful as prostate cancer markers. Table 6 lists newly-identified nucleotide sequences useful as prostate cancer markers.

### Other Embodiments

[0315] Those skilled in the art will recognize, or be able to ascertain using no more than routine experimentation, many equivalents to the specific embodiments of the invention described herein. Such equivalents are intended to be encompassed by the following claims:

What is claimed:

1. An isolated nucleic acid molecule comprising a nucleotide sequence selected from the group consisting of Tables 5 and 6.

2. A vector which contains the nucleic acid molecule of claim 1.

3. A host cell which contains the nucleic acid molecule of claim 1.

4. An isolated polypeptide which is encoded by a nucleic acid molecule comprising a nucleotide sequence selected from the group consisting of Tables 5 and 6.

5. An antibody which selectively binds to the polypeptide of claim 4.

6. An isolated polypeptide comprising an amino acid sequence selected from the group consisting of Table 5.

7. An antibody which selectively binds to the polypeptide of claim 6.

8. A method of assessing whether a patient is afflicted with prostate cancer, the method comprising comparing:
a) the level of expression of a marker in a patient sample, wherein the marker is selected from the group consisting of the markers of Table 1; and
b) the normal level of expression of the marker in a control non-prostate cancer sample,
wherein a significant increase in the level of expression of the marker in the patient sample and the normal level is an indication that the patient is afflicted with prostate cancer.

The application's sequence listing, which the Patent Office published only in electronic form, follows.

SEQUENCE LISTING (455 sequences)

SEQ ID NO: 1 - DNA, 5870 bp, Homo sapiens
ggacaggcgtggcggccggagccccagcatccctgcttgaggtccaggagcggagcccgcggccaccgccgcctgatcagcgcgaccccggcccgcgcccgccccgcccggcaagatgctgcccgtgtaccaggaggtgaagcccaacccgctgcaggacgcgaacatctgctcacgcgtgttcttctggtggctcaatcccttgtttaaaattggccataaacggagattagaggaagatgatatgtattcagtgctgccagaagaccgctcacagcaccttggagaggagttgcaagggttctgggataaagaagttttaagagctgagaatgacgcacagaagccttctttaacaagagcaatcataaagtgttactggaaatcttatttagttttgggaatttttacgttaattgaggaaagtgccaaagtaatccagcccatatttttgggaaaaattattaattattttgaaaattatgatcccatggattctgtggctttgaacacagcgtacgcctatgccacggtgctgactttttgcacgctcattttggctatactgcatcacttatatttttatcacgttcagtgtgctgggatgaggttacgagtagccatgtgccatatgatttatcggaaggcacttcgtcttagtaacatggccatggggaagacaaccacaggccagatagtcaatctgctgtccaatgatgtgaacaagtttgatcaggtgacagtgttcttacacttcctgtgggcaggaccactgcaggcgatcgcagtgactgccctactctggatggagataggaatatcgtgccttgctgggatggcagttctaatcattctcctgcccttgcaaagctgttttgggaagttgttctcatcactgaggagtaaaactgcaactttcacggatgccaggatcaggaccatgaatgaagttataactggtataaggataataaaaatgtacgcctgggaaaagtcattttcaaatcttattaccaatttgagaaagaaggagatttccaagattctgagaagttcctgcctcagggggatgaatttggcttcgtttttcagtgcaagcaaaatcatcgtgtttgtgaccttcaccacctacgtgctcctcggcagtgtgatcacagccagccgcgtgttcgtggcagtgacgctgtatggggctgtgcggctgacggttaccctcttcttcccctcagccattgagagggtgtcagaggcaatcgtcagcatccgaagaatccagacctttttgctacttgatgagatatcacagcgcaaccgtcagctgccgtcagatggtaaaaagatggtgcatgtgcaggattttactgctttttgggataaggcatcagagaccccaactctacaaggcctttcctttactgtcagacctggcgaattgttagctgtggtcggccccgtgggagcagggaagtcatcactgttaagtgccgtgctcggggaattggccccaagtcacgggctggtcagcgtgcatggaagaattgcctatgtgtctcagcagccctgggtgttctcgggaactctgaggagtaatattttatttgggaagaaatatgaaaaggaacgatatgaaaaagtcataaaggcttgtgctctgaaaaaggatttacagctgttggaggatggtgatctgactgtgataggagatcggggaaccacgctgagtggagggcagaaagcacgggtaaaccttgcaagagcagtgtatcaagatgctgacatctatctcctggacgatcctctcagtgcagtagatgcggaagttagcagacacttgttcgaactgtgtatttgtcaaattttgcatgagaagatcacaattttagtgactcatcagttgcagtacctcaaagctgcaagtcagattctgatattgaaagatggtaaaatggtgcagaaggggacttacactgagttcctaaaatctggtatagattttggctcccttttaaagaaggataatgaggaaagtgaacaacctccagttccaggaactcccacactaaggaatcgtaccttctcagagtcttcggtttggtctcaacaatcttctagaccctccttgaaagatggtgctctggagagccaagatacagagaatgtcccagttacactatcagaggagaaccgttctgaaggaaaagttggttttcaggcctataagaattacttcagagctggtgctcactggattgtcttcattttccttattctcctaaacactgcagctcaggttgcctatgtgcttcaagattggtggctttcatactgggcaaacaaacaaagtatgctaaatgtcactgtaaatggaggaggaaatgtaaccgagaagctagatcttaactggtacttaggaatttattcaggtttaactgtagctaccgttctttttggcatagcaagatctctattggtattctacgtccttgttaactcttcacaaactttgcacaacaaaatgtttgagtcaattctgaaagctccggtattattctttgatagaaatccaataggaagaattttaaatcgtttctccaaagacattggacacttggatgatttgctgccgctgacgtttttagatttcatccagacattgctacaagtggttggtgtggtctctgtggctgtggccgtgattccttggatcgcaatacccttggttccccttggaatcattttcatttttcttcggcgatattttttggaaacgtcaagagatgtgaagcgcctggaatctacaactcggagtccagtgttttcccacttgtcatcttctctccaggggctctggaccatccgggcatacaaagcagaagagaggtgtcaggaactgtttgatgcacaccaggatttacattcagaggcttggttcttgtttttgacaacgtcccgctggttcgccgtccgtctggatgccatctgtgccatgtttgtcatcatcgttgcctttgggtccctgattctggcaaaaactctggatgccgggcaggttggtttggcactgtcctatgccctcacgctcatggggatgtttcagtggtgtgttcgacaaagtgctgaagttgagaatatgatgatctcagtagaaagggtcattgaatacacagaccttgaaaaagaagcaccttgggaatatcagaaacgcccaccaccagcctggccccatgaaggagtgataatctttgacaatgtgaacttcatgtacagtccaggtgggcctctggtactgaagcatctgacagcactcattaaatcacaagaaaaggttggcattgtgggaagaaccggagctggaaaaagttccctcatctcagccctttttagattgtcagaacccgaaggtaaaatttggattgataagatcttgacaactgaaattggacttcacgatttaaggaagaaaatgtcaatcatacctcaggaacctgttttgttcactggaacaatgaggaaaaacctggatccctttaaggagcacacggatgaggaactgtggaatgccttacaagaggtacaacttaaagaaaccattgaagatcttcctggtaaaatggatactgaattagcagaatcaggatccaattttagtgttggacaaagacaactggtgtgccttgccagggcaattctcaggaaaaatcagatattgattattgatgaagcgacggcaaatgtggatccaagaactgatgagttaatacaaaaaaaaatccgggagaaatttgcccactgcaccgtgctaaccattgcacacagattgaacaccattattgacagcgacaagataatggttttagattcaggaagactgaaagaatatgatgagccgtatgttttgctgcaaaataaagagagcctattttacaagatggtgcaacaactgggcaaggcagaagccgctgccctcactgaaacagcaaaacaggtatacttcaaaagaaattatccacatattggtcacactgaccacatggttacaaacacttccaatggacagccctcgaccttaactattttcgagacagcactgtgaatccaaccaaaatgtcaagtccgttccgaaggcattttccactagtttttggactatgtaaaccacattgtacttttttttactttggcaacaaatatttatacatacaagatgctagttcatttgaatatttctcccaacttatccaaggatctccagctctaacaaaatggtttatttttatttaaatgtcaatagttgttttttaaaatccaaatcagaggtgcaggccaccagttaaatgccgtctatcaggttttgtgccttaagagactacagagtcaaagctcatttttaaaggagtaggacaaagttgtcacaggtttttgttgttgtttttattgcccccaaaattacatgttaatttccatttatatcagggattctatttacttgaagactgtgaagttgccattttgtctcattgttttctttgacataactaggatccattatttcccctgaaggcttcttgttagaaaatagtacagttacaaccaataggaacaacaaaaagaaaaagtttgtgacattgtagtagggagtgtgtaccccttactccccatcaaaaaaaaaatggatacatggttaaaggatagaagggcaatattttatcatatgttctaaaagagaaggaagagaaaatactactttctcaaaatggaagcccttaaaggtgctttgatactgaaagacacaaatgtgaccgtccatcctcctttagagttgcatgacttggacacggtaactgttgcagttttagactcagcattgtgacacttcccaagaaggccaaacctctaaccgacattcctgaaatacgtggcattattcttttttggatttctcatttatggaaggctaaccctctgttgaccgtaagccttttggtttgggctgtattgaaatcctttctaaattgcatgaataggctctgctaacgtgatgagacaaactgaaaattattgcaagcattgactataattatgcagtacgttctcaggatgcatccaggggttcattttcatgagcctgtccaggttagtttactcctgaccactaatagcattgtcatttgggctttctgttgaatgaatcaacaaaccacaatacttcctgggaccttttgtactttatttgaactatgagtctttaatttttcctgatgatggtggctgtaatatgttgagttcagtttactaaaggttttactattatggtttgaagtggagtctcatgacctctcagaataaggtgtcacctccctgaaattgcatatatgtatatagacatgcacacgtgtgcatttgtttgtatacatatatttgtccttcgtatagcaagttttttgctcatcagcagagagcaacagatgttttattgagtgaagccttaaaaagcacacaccacacacagctaactgccaaaatacattgaccgtagtagctgttcaactcctagtacttagaaatacacgtatggttaatgttcagtccaacaaaccacacacagtaaatgtttattaatagtcatggttcgtattttaggtgactgaaattgcaacagtgatcataatgaggtttgttaaaatgatagctatattcaaaatgtctatatgtttatttggacttttgaggttaaagacagtcatataaacgtcctgtttctgttttaatgttatcatagaattttttaatgaaactaaattcaattgaaataaatgatagttttcatctccaaaaaaaaaaaaaaaaaaaaaaaaaaaaaaaaaaaaaaa

SEQ ID NO: 2 - protein, 1325 aa, Homo sapiens
MLPVYQEVKPNPLQDANICSRVFFWWLNPLFKIGHKRRLEEDDMYSVLPEDRSQHLGEELQGFWDKEVLRAENDAQKPSLTRAIIKCYWKSYLVLGIFTLIEESAKVIQPIFLGKIINYFENYDPMDSVALNTAYAYATVLTFCTLILAILHHLYFYHVQCAGMRLRVAMCHMIYRKALRLSNMAMGKTTTGQIVNLLSNDVNKFDQVTVFLHFLWAGPLQAIAVTALLWMEIGISCLAGMAVLIILLPLQSCFGKLFSSLRSKTATFTDARIRTMNEVITGIRIIKMYAWEKSFSNLITNLRKKEISKILRSSCLRGMNLASFFSASKIIVFVTFTTYVLLGSVITASRVFVAVTLYGAVRLTVTLFFPSAIERVSEAIVSIRRIQTFLLLDEISQRNRQLPSDGKKMVHVQDFTAFWDKASETPTLQGLSFTVRPGELLAVVGPVGAGKSSLLSAVLGELAPSHGLVSVHGRIAYVSQQPWVFSGTLRSNILFGKKYEKERYEKVIKACALKKDLQLLEDGDLTVIGDRGTTLSGGQKARVNLARAVYQDADIYLLDDPLSAVDAEVSRHLFELCICQILHEKITILVTHQLQYLKAASQILILKDGKMVQKGTYTEFLKSGIDFGSLLKKDNEESEQPPVPGTPTLRNRTFSESSVWSQQSSRPSLKDGALESQDTENVPVTLSEENRSEGKVGFQAYKNYFRAGAHWIVFIFLILLNTAAQVAYVLQDWWLSYWANKQSMLNVTVNGGGNVTEKLDLNWYLGIYSGLTVATVLFGIARSLLVFYVLVNSSQTLHNKMFESILKAPVLFFDRNPIGRILNRFSKDIGHLDDLLPLTFLDFIQTLLQVVGVVSVAVAVIPWIAIPLVPLGIIFIFLRRYFLETSRDVKRLESTTRSPVFSHLSSSLQGLWTIRAYKAEERCQELFDAHQDLHSEAWFLFLTTSRWFAVRLDAICAMFVIIVAFGSLILAKTLDAGQVGLALSYALTLMGMFQWCVRQSAEVENMMISVERVIEYTDLEKEAPWEYQKRPPPAWPHEGVIIFDNVNFMYSPGGPLVLKHLTALIKSQEKVGIVGRTGAGKSSLISALFRLSEPEGKIWIDKILTTEIGLHDLRKKMSIIPQEPVLFTGTMRKNLDPFKEHTDEELWNALQEVQLKETIEDLPGKMDTELAESGSNFSVGQRQLVCLARAILRKNQILIIDEATANVDPRTDELIQKKIREKFAHCTVLTIAHRLNTIIDSDKIMVLDSGRLKEYDEPYVLLQNKESLFYKMVQQLGKAEAAALTETAKQVYFKRNYPHIGHTDHMVTNTSNGQPSTLTIFETAL

SEQ ID NO: 3 - DNA, 2238 bp, Homo sapiens
cgttgccgggtcgcaggtcccgccagtgcgagcgcaacggaggtcgaaggcgttcagactcttagctgaacgcggagctgcggcggctatgctgtggagcggctgccggcgtttcggggcgcgcctcggctgcctgcccggcggtctccgggtcctcgtccagaccggccaccggagcttgacctcctgcatcgacccttccatgggacttaatgaagagcagaaagaatttcaaaaagtggcctttgactttgctgcccgagagatggctccaaatatggcagagtgggaccagaaggagctgttcccagtggatgtgatgcggaaggcagcccagctaggcttcggaggggtctacatacaaacagatgtgggcgggtctgggctgtcacgtcttgatacctctgtcatttttgaagccttggctacaggctgcaccagcaccacagcctatataagcatccacaacatgtgtgcctggatgattgatagcttcggaaatgaggaacagaggcacaaattttgcccaccgctctgtaccatggagaagtttgcttcctactgcctcactgaaccaggaagtgggagtgatgctgcctctcttctgacctccgctaagaaacagggagatcattacatcctcaatggctccaaggccttcatcagtggtgctggtgagtcagacatctatgtggtcatgtgccgaacaggaggaccaggccccaagggcatctcatgcatagttgttgagaaggggacccctggcctcagctttggcaagaaggagaaaaaggtggggtggaactcccagccaacacgagctgtgatcttcgaagactgtgctgtccctgtggccaacagaattgggagcgaggggcagggcttcctcattgccgtgagaggactgaacggagggaggatcaatattgcttcctgctccctgggggctgcccacgcctctgtcatcctcacccgagaccacctcaatgtccggaagcagtttggagagcctctggccagtaaccagtacttgcaattcacactggctgatatggcaacaaggctggtggccgcgcggctgatggtccgcaatgcagcagtggctctgcaggaggagaggaaggatgcagtggccttgtgctccatggccaagctctttgctacagatgaatgctttgccatctgcaaccaggccttgcagatgcacgggggctacggctacctgaaggattacgctgttcagcagtacgtgcgggactccagggtccaccagattctagaaggtagcaatgaagtgatgaggatactgatctctagaagcctgcttcaggagtagaacccacacttgttctggcctggtgttcagtgcgactgcagtcagtgttgagtggtgccatgtgggccgctctattccaaaggaatcatggattagacccaagggctgagctcctctagggcaggacctgcaccctgtgtgttggcaccagcatcgggtcttggactggggcagaatccccagtggaaccggaagagctggactgatgagaaacatcagaagaacacatactaccttgttttcctaatgccagaagggtgaccagtgaagattcaccgtcaaaccatgaaagtcctttcttggatccactttatcttgattagtctgcattttactagttcactggatccctcctctaggggcctggggactttcactgatgctcttcctgattctagagcaaaggtgtgggaaggggaaatggaggaatgccctcctgtctgtgtcgttctctgtgccacagctacagatgcagaaggtttctctggatagcacacctctgaatgtaaatcatgataaaatggatatttggaaacttactcctaagctgtgatgtagggtgtatttctacttctggactgcctcaatatcaagggctgagacttttgaatgttgaatattcgttgggtttcatgttaagacgcctgtggtccaggagtgctattcagtgtttctgttcctgataaacactttgaatatttttttgtgtttttgtttccttttctgaagctgttcctccttttaaatatttttaatcacattgataaaatctatccttcatccacctctggttctactatagttgatttttattttaaatgtttaattgtatttgattaaacacttaactggattttggaataataaaactctcgtccaatttggcttttaaaaaaaaaaaa

SEQ ID NO: 4 - protein, 415 aa, Homo sapiens
MLWSGCRRFGARLGCLPGGLRVLVQTGHRSLTSCIDPSMGLNEEQKEFQKVAFDFAAREMAPNMAEWDQKELFPVDVMRKAAQLGFGGVYIQTDVGGSGLSRLDTSVIFEALATGCTSTTAYISIHNMCAWMIDSFGNEEQRHKFCPPLCTMEKFASYCLTEPGSGSDAASLLTSAKKQGDHYILNGSKAFISGAGESDIYVVMCRTGGPGPKGISCIVVEKGTPGLSFGKKEKKVGWNSQPTRAVIFEDCAVPVANRIGSEGQGFLIAVRGLNGGRINIASCSLGAAHASVILTRDHLNVRKQFGEPLASNQYLQFTLADMATRLVAARLMVRNAAVALQEERKDAVALCSMAKLFATDECFAICNQALQMHGGYGYLKDYAVQQYVRDSRVHQILEGSNEVMRILISRSLLQE

SEQ ID NO: 5 - DNA, 2712 bp, Homo sapiens
gtactttcccgtgtggaggcgcgcccagtcaccttgttgcggtagcctcaaggtgaggaatcgagacccaccaagtatgatgaataaacccagactctcagcaatgcaggaaaggaacaaacgggcagcttgggaaaagggggcacacataccacagcgactaggtaaactctacacagaccaagattttgatagtttacctgcgcaaattacagttccggagaaaatacggtcaataataaaggaaggaattgaatcgcaggcatcctacaaaattgtaattgaagggaaaccatatactgtgaatttaatgcaaaaaaactttttaccccataattttagagtttacagttatagtggcacaggaattatgaaaccacttgaccaagattttcagaatttctgccactaccaagggtatattgaaggttatccaaaatctgtggtgatggttagcacatgtactggactcaggggcgtactacagtttgaaaatgttagttatggaatagaacccctggagtcttcagttggctttgaacatgtaatttaccaagtaaaacataagaaagcagatgtttccttatataatgagaaggatattgaatcaagagatctgtcctttaaattacaaagcgtagagccacagcaagattttgcaaagtatatagaaatgcatgttatagttgaaaaacaattgtataatcatatggggtctgatacaactgttgtcgctcaaaaagttttccagttgattggattgacgaatgctatttttgtttcatttaatattacaattattctgtcttcattggagctttggatagatgaaaataaaattgcaaccactggagaagctaatgagttattacacacatttttaagatggaaaacatcttatcttgttttacgtcctcatgatgtggcatttttacttgtttacagagaaaagtcaaattatgttggtgcaacctttcaagggaagatgtgtgatgcaaactatgcaggaggtgttgttctgcaccccagaaccataagtctggaatcacttgcagttattttagctcaattattgagccttagtatggggatcacttatgatgacattaacaaatgccagtgctcaggagctgtctgcattatgaatccagaagcaattcatttcagtggtgtgaagatctttagtaactgcagcttcgaagactttgcacattttatttcaaagcagaagtcccagtgtcttcacaatcagcctcgcttagatccttttttcaaacagcaagcagtgtgtggtaatgcaaagctggaagcaggagaggagtgtgactgtgggactgaacaggattgtgcccttattggagaaacatgctgtgatattgccacatgtagatttaaagccggttcaaactgtgctgaaggaccatgctgcgaaaactgtctatttatgtcaaaagaaagaatgtgtaggccttcctttgaagaatgcgacctccctgaatattgcaatggatcatctgcatcatgcccagaaaaccactatgttcagactgggcatccgtgtggactgaatcaatggatctgtatagatggagtttgtatgagtggggataaacaatgtacagacacatttggcaaagaagtagagtttggcccttcagaatgttattctcaccttaattcaaagactgatgtatctggaaactgtggtataagtgattcaggatacacacagtgtgaagctgacaatctgcagtgcggaaaattaatatgtaaatatgtaggtaaatttttattacaaattccaagagccactattatttatgccaacataagtggacatctctgcattgctgtggaatttgccagtgatcatgcagacagccaaaagatgtggataaaagatggaacttcttgtggttcaaataaggtttgcaggaatcaaagatgtgtgagttcttcatacttgggttatgattgtactactgacaaatgcaatgatagaggtgtatgcaataacaaaaagcactgtcactgtagtgcttcatatttacctccagattgctcagttcaatcagatctatggcctggtgggagtattgacagtggcaattttccacctgtagctataccagccagactccctgaaaggcgctacattgagaacatttaccattccaaaccaatgagatggccatttttcttattcattcctttctttattattttctgtgtactgattgctataatggtgaaagttaatttccaaaggaaaaaatggagaactgaggactattcaagcgatgagcaacctgaaagtgagagtgaacctaaagggtagtctggacaacagagatgccatgatatcacttcttctagagtaattatctgtgatggatggacacaaaaaaatggaaagaaaagaatgtacattacctggtttcctgggattcaaacctgcatattgtgattttaatttgaccagaaaatatgatatatatgtataatttcacagataatttacttatttaaaaatgcatgataatgagttttacattacaaatttctgtttttttaaagttatcttacgctatttctgttggttagtagacactaattctgtcagtaggggcatggtataaggaaatatcataatgtaatgaggtggtactatgattaaaagccactgttacatttcaaaaaaaaaaaaaaaaa

SEQ ID NO: 6 - protein, 753 aa, Homo sapiens
MMNKPRLSAMQERNKRAAWEKGAHIPQRLGKLYTDQDFDSLPAQITVPEKIRSIIKEGIESQASYKIVIEGKPYTVNLMQKNFLPHNFRVYSYSGTGIMKPLDQDFQNFCHYQGYIEGYPKSVVMVSTCTGLRGVLQFENVSYGIEPLESSVGFEHVIYQVKHKKADVSLYNEKDIESRDLSFKLQSVEPQQDFAKYIEMHVIVEKQLYNHMGSDTTVVAQKVFQLIGLTNAIFVSFNITIILSSLELWIDENKIATTGEANELLHTFLRWKTSYLVLRPHDVAFLLVYREKSNYVGATFQGKMCDANYAGGVVLHPRTISLESLAVILAQLLSLSMGITYDDINKCQCSGAVCIMNPEAIHFSGVKIFSNCSFEDFAHFISKQKSQCLHNQPRLDPFFKQQAVCGNAKLEAGEECDCGTEQDCALIGETCCDIATCRFKAGSNCAEGPCCENCLFMSKERMCRPSFEECDLPEYCNGSSASCPENHYVQTGHPCGLNQWICIDGVCMSGDKQCTDTFGKEVEFGPSECYSHLNSKTDVSGNCGISDSGYTQCEADNLQCGKLICKYVGKFLLQIPRATIIYANISGHLCIAVEFASDHADSQKMWIKDGTSCGSNKVCRNQRCVSSSYLGYDCTTDKCNDRGVCNNKKHCHCSASYLPPDCSVQSDLWPGGSIDSGNFPPVAIPARLPERRYIENIYHSKPMRWPFFLFIPFFIIFCVLIAIMVKVNFQRKKWRTEDYSSDEQPESESEPKG

SEQ ID NO: 7 - DNA, 2760 bp, Homo sapiens
catctcgcgtccgggaagctcgcacgttccacagcgcaccacacccacctcagcccacctgggctctcccagccgcctacctcttccaggctgcgtggccggggcgtcatctcgcgcttccaactgccctgtaaccaccaactgccattattccggctgggacccaggacttcaagccatgtggcgcgtcttgtttctgctcagcgggctcggcgggctgcggatggacagtaattttgatagtttacctgtgcaaattacagttccggagaaaatacggtcaataataaaggaaggaattgaatcgcaggcatcctacaaaattgtaattgaagggaaaccatatactgtgaatttaatgcaaaaaaactttttaccccataattttagagtttacagttatagtggcacaggaattatgaaaccacttgaccaagattttcagaatttctgccactaccaagggtatattgaaggttatccaaaatctgtggtgatggttagcacatgtactggactcaggggcgtactacagtttgaaaatgttagttatggaatagaacccctggagtcttcagttggctttgaacatgtaatttaccaagtaaaacataagaaagcagatgtttccttatataatgagaaggatattgaatcaagagatctgtcctttaaattacaaagcgtagagccacagcaagattttgcaaagtatatagaaatgcatgttatagttgaaaaacaattgtataatcatatggggtctgatacaactgttgtcgctcaaaaagttttccagttgattggattgacgaatgctatttttgtttcatttaatattacaattattctgtcttcattggagctttggatagatgaaaataaaattgcaaccactggagaagctaatgagttattacacacatttttaagatggaaaacatcttatcttgttttacgtcctcatgatgtggcatttttacttgtttacagagaaaagtcaaattatgttggtgcaacctttcaagggaagatgtgtgatgcaaactatgcaggaggtgttgttctgcaccccagaaccataagtctggaatcacttgcagttattttagctcaattattgagccttagtatggggatcacttatgatgacattaacaaatgccagtgctcaggagctgtctgcattatgaatccagaagcaattcatttcagtggtgtgaagatctttagtaactgcagcttcgaagactttgcacattttatttcaaagcagaagtcccagtgtcttcacaatcagcctcgcttagatccttttttcaaacagcaagcagtgtgtggtaatgcaaagctggaagcaggagaggagtgtgactgtgggactgaacaggattgtgcccttattggagaaacatgctgtgatattgccacatgtagatttaaagccggttcaaactgtgctgaaggaccatgctgcgaaaactgtctatttatgtcaaaagaaagaatgtgtaggccttcctttgaagaatgcgacctccctgaatattgcaatggatcatctgcatcatgcccagaaaaccactatgttcagactgggcatccgtgtggactgaatcaatggatctgtatagatggagtttgtatgagtggggataaacaatgtacagacacatttggcaaagaagtagagtttggcccttcagaatgttattctcaccttaattcaaagactgatgtatctggaaactgtggtataagtgattcaggatacacacagtgtgaagctgacaatctgcagtgcggaaaattaatatgtaaatatgtaggtaaatttttattacaaattccaagagccactattatttatgccaacataagtggacatctctgcattgctgtggaatttgccagtgatcatgcagacagccaaaagatgtggataaaagatggaacttcttgtggttcaaataaggtttgcaggaatcaaagatgtgtgagttcttcatacttgggttatgattgtactactgacaaatgcaatgatagaggtgtatgcaataacaaaaagcactgtcactgtagtgcttcatatttacctccagattgctcagttcaatcagatctatggcctggtgggagtattgacagtggcaattttccacctgtagctataccagccagactccctgaaaggcgctacattgagaacatttaccattccaaaccaatgagatggccatttttcttattcattcctttctttattattttctgtgtactgattgctataatggtgaaagttaatttccaaaggaaaaaatggagaactgaggactattcaagcgatgagcaacctgaaagtgagagtgaacctaaagggtagtctggacaacagagatgccatgatatcacttcttctagagtaattatctgtgatggatggacacaaaaaaatggaaagaaaagaatgtacattacctggtttcctgggattcaaacctgcatattgtgattttaatttgaccagaaaatatgatatatatgtataatttcacagataatttacttatttaaaaatgcatgataatgagttttacattacaaatttctgtttttttaaagttatcttacgctatttctgttggttagtagacactaattctgtcagtaggggcatggtataaggaaatatcataatgtaatgaggtggtactatgattaaaagccactgttacatttcaaaaaaaaaaaaaaaaa

SEQ ID NO: 8 - protein, 735 aa, Homo sapiens
MWRVLFLLSGLGGLRMDSNFDSLPVQITVPEKIRSIIKEGIESQASYKIVIEGKPYTVNLMQKNFLPHNFRVYSYSGTGIMKPLDQDFQNFCHYQGYIEGYPKSVVMVSTCTGLRGVLQFENVSYGIEPLESSVGFEHVIYQVKHKKADVSLYNEKDIESRDLSFKLQSVEPQQDFAKYIEMHVIVEKQLYNHMGSDTTVVAQKVFQLIGLTNAIFVSFNITIILSSLELWIDENKIATTGEANELLHTFLRWKTSYLVLRPHDVAFLLVYREKSNYVGATFQGKMCDANYAGGVVLHPRTISLESLAVILAQLLSLSMGITYDDINKCQCSGAVCIMNPEAIHFSGVKIFSNCSFEDFAHFISKQKSQCLHNQPRLDPFFKQQAVCGNAKLEAGEECDCGTEQDCALIGETCCDIATCRFKAGSNCAEGPCCENCLFMSKERMCRPSFEECDLPEYCNGSSASCPENHYVQTGHPCGLNQWICIDGVCMSGDKQCTDTFGKEVEFGPSECYSHLNSKTDVSGNCGISDSGYTQCEADNLQCGKLICKYVGKFLLQIPRATIIYANISGHLCIAVEFASDHADSQKMWIKDGTSCGSNKVCRNQRCVSSSYLGYDCTTDKCNDRGVCNNKKHCHCSASYLPPDCSVQSDLWPGGSIDSGNFPPVAIPARLPERRYIENIYHSKPMRWPFFLFIPFFIIFCVLIAIMVKVNFQRKKWRTEDYSSDEQPESESEPKG

SEQ ID NO: 9 - DNA, 2650 bp, Homo sapiens
catctcgcacttccaactgccctgtaaccaccaactgcccttattccggctgggacccaggacttcaagccatgtgggtcttgtttctgctcagcgggctcggcgggctgcggatggacagtaattttgatagtttacctgtgcaaattacagttccggagaaaatacggtcaataataaaggaaggaattgaatcgcaggcatcctacaaaattgtaattgaagggaaaccatatactgtgaatttaatgcaaaaaaactttttaccccataattttagagtttacagttatagtggcacaggaattatgaaaccacttgaccaagattttcagaatttctgccactaccaagggtatattgaaggttatccaaaatctgtggtgatggttagcacatgtactggactcaggggcgtactacagtttgaaaatgttagttatggaatagaacccctggagtcttcagttggctttgaacatgtaatttaccaagtaaaacataagaaagcagatgtttccttatataatgagaaggatattgaatcaagagatctgtcctttaaattacaaagcgcagagccacagcaagattttgcaaagtatatagaaatgcatgttatagttgaaaaacaattgtataatcatatggggtctgatacaactgttgtcgctcaaaaagttttccagttgattggattgacgaatgctatttttgtttcatttaatattacaattattctgtcttcattggagctttggatagatgaaaataaaattgcaaccactggagaagctaatgagttattacacacatttttaagatggaaaacatcttatcttgttttacgtcctcatgatgtggcatttttacttgtttacagagaaaagtcaaattatgttggtgcaacctttcaagggaagatgtgtgatgcaaactatgcaggaggtgttgttctgcaccccagaaccataagtctggaatcacttgcagttattttagctcaattattgagccttagtatggggatcacttatgatgacattaacaaatgccagtgctcaggagctgtctgcattatgaatccagaagcaattcatttcagtggtgtgaagatctttagtaactgcagcttcgaagactttgcacattttatttcaaagcagaagtcccagtgtcttcacaatcagcctcgcttagatccttttttcaaacagcaagcagtgtgtggtaatgcaaagctggaagcaggagaggagtgtgactgtgggactgaacaggattgtgcccttattggagaaacatgctgtgatattgccacatgtagatttaaagccggttcaaactgtgctgaaggaccatgctgcgaaaactgtctatttatgtcaaaagaaagaatgtgtaggccttcctttgaagaatgcgacctccctgaatattgcaatggatcatctgcatcatgcccagaaaaccactatgttcagactgggcatccgtgtggactgaatcaatggatctgtatagatggagtttgtatgagtggggataaacaatgtacagacacatttggcaaagaagtagagtttggcccttcagaatgttattctcaccttaattcaaagactgatgtatctggaaactgtggtataagtgattcaggatacacacagtgtgaagctgacaatctgcagtgcggaaaattaatatgtaaatatgtaggtaaatttttattacaaattccaagagccactattatttatgccaacataagtggacatctctgcattgctgtggaatttgccagtgatcatgcagacagccaaaagatgtggataaaagatggaacttcttgtggttcaaataaggtttgcaggaatcaaagatgtgtgagttcttcatacttgggttatgattgtactactgacaaatgcaatgatagaggtgtatgcaataacaaaaagcactgtcactgtagtgcttcatatttacctccagattgctcagttcaatcagatctatggcctggtgggagtattgacagtggcaattttccacctgtagctataccagccagactccctgaaaggcgctacattgagaacatttaccattccaaaccaatgagatggccatttttcttattcattcctttctttattattttctgtgtactgattgctataatggtgaaagttaatttccaaaggaaaaaatggagaactgaggactattcaagcgatgagcaacctgaaagtgagagtgaacctaaagggtagtctggacaacagagatgccatgatatcacttcttctagagtaattatctgtgatggatggacacaaaaaaatggaaagaaaagaatgtacattacctggtttcctgggattcaaacctgcatattgtgattttaatttgaccagaaaatatgatatatatgtataatttcacagataatttacttatttaaaaatgcatgataatgagttttacattacaaatttctgtttttttaaagttatcttacgctatttctgttggttagtagacactaattctgtcagtaggggcatggtataaggaaatatcataatgtaatgaggtggtactatgattaaaagccactgttacatttcaaaaaaaaaaaaaaaaa

SEQ ID NO: 10 - protein, 734 aa, Homo sapiens
MWVLFLLSGLGGLRMDSNFDSLPVQITVPEKIRSIIKEGIESQASYKIVIEGKPYTVNLMQKNFLPHNFRVYSYSGTGIMKPLDQDFQNFCHYQGYIEGYPKSVVMVSTCTGLRGVLQFENVSYGIEPLESSVGFEHVIYQVKHKKADVSLYNEKDIESRDLSFKLQSAEPQQDFAKYIEMHVIVEKQLYNHMGSDTTVVAQKVFQLIGLTNAIFVSFNITIILSSLELWIDENKIATTGEANELLHTFLRWKTSYLVLRPHDVAFLLVYREKSNYVGATFQGKMCDANYAGGVVLHPRTISLESLAVILAQLLSLSMGITYDDINKCQCSGAVCIMNPEAIHFSGVKIFSNCSFEDFAHFISKQKSQCLHNQPRLDPFFKQQAVCGNAKLEAGEECDCGTEQDCALIGETCCDIATCRFKAGSNCAEGPCCENCLFMSKERMCRPSFEECDLPEYCNGSSASCPENHYVQTGHPCGLNQWICIDGVCMSGDKQCTDTFGKEVEFGPSECYSHLNSKTDVSGNCGISDSGYTQCEADNLQCGKLICKYVGKFLLQIPRATIIYANISGHLCIAVEFASDHADSQKMWIKDGTSCGSNKVCRNQRCVSSSYLGYDCTTDKCNDRGVCNNKKHCHCSASYLPPDCSVQSDLWPGGSIDSGNFPPVAIPARLPERRYIENIYHSKPMRWPFFLFIPFFIIFCVLIAIMVKVNFQRKKWRTEDYSSDEQPESESEPKG

SEQ ID NO: 11 - DNA, 2539 bp, Homo sapiens
cgggacgacgccccctcctgcggcgtggactccgtcagtggcccaccaagaaggaggaggaatatggaatccaagggggccagttcctgccgtctgctcttctgcctcttgatctccgccaccgtcttcaggccaggccttggatggtatactgtaaattcagcatatggagataccattatcataccttgccgacttgacgtacctcagaatctcatgtttggcaaatggaaatatgaaaagcccgatggctccccagtatttattgccttcagatcctctacaaagaaaagtgtgcagtacgacgatgtaccagaatacaaagacagattgaacctctcagaaaactacactttgtctatcagtaatgcaaggatcagtgatgaaaagagatttgtgtgcatgctagtaactgaggacaacgtgtttgaggcacctacaatagtcaaggtgttcaagcaaccatctaaacctgaaattgtaagcaaagcactgtttctcgaaacagagcagctaaaaaagttgggtgactgcatttcagaagacagttatccagatggcaatatcacatggtacaggaatggaaaagtgctacatccccttgaaggagcggtggtcataatttttaaaaaggaaatggacccagtgactcagctctataccatgacttccaccctggagtacaagacaaccaaggctgacatacaaatgccattcacctgctcggtgacatattatggaccatctggccagaaaacaattcattctgaacaggcagtatttgatatttactatcctacagagcaggtgacaatacaagtgctgccaccaaaaaatgccatcaaagaaggggataacatcactcttaaatgcttagggaatggcaaccctcccccagaggaatttttgttttacttaccaggacagcccgaaggaataagaagctcaaatacttacacactgatggatgtgaggcgcaatgcaacaggagactacaagtgttccctgatagacaaaaaaagcatgattgcttcaacagccatcacagttcactatttggatttgtccttaaacccaagtggagaagtgactagacagattggtgatgccctacccgtgtcatgcacaatatctgctagcaggaatgcaactgtggtatggatgaaagataacatcaggcttcgatctagcccgtcattttctagtcttcattatcaggatgctggaaactatgtctgcgaaactgctctgcaggaggttgaaggactaaagaaaagagagtcattgactctcattgtagaaggcaaacctcaaataaaaatgacaaagaaaactgatcccagtggactatctaaaacaataatctgccatgtggaaggttttccaaagccagccattcagtggacaattactggcagtggaagcgtcataaaccaaacagaggaatctccttatattaatggcaggtattatagtaaaattatcatttcccctgaagagaatgttacattaacttgcacagcagaaaaccaactggagagaacagtaaactccttgaatgtctctgctataagtattccagaacacgatgaggcagacgagataagtgatgaaaacagagaaaaggtgaatgaccaggcaaaactaattgtgggaatcgttgttggtctcctccttgctgcccttgttgctggtgtcgtctactggctgtacatgaagaagtcaaagactgcatcaaaacatgtaaacaaggacctcggtaatatggaagaaaacaaaaagttagaagaaaacaatcacaaaactgaagcctaagagagaaactgtcctagttgtccagagataaaaatcatatagaccaattgaagcatgaacgtggattgtatttaagacataaacaaagacattgacagcaattcatggttcaagtattaagcagttcattctaccaagctgtcacaggttttcagagaattatctcaagtaaaacaaatgaaatttaattacaaacaataagaacaagttttggcagccatgataataggtcatatgttgtgtttggttcaattttttttccgtaaatgtctgcactgaggatttctttttggtttgccttttatgtaaattttttacgtagctatttttatacactgtaagctttgttctgggagttgctgttaatctgatgtataatgtaatgtttttatttcaattgtttatatggataatctgagcaggtacatttctgattctgattgctatcagcaatgccccaaactttctcataagcacctaaaacccaaaggtggcagcttgtgaagattggggacactcatattgccctaattaaaaactgtgatttttatcacaagggaggggaggccgagagtcagactgatagacaccataggagccgactctttgatatgccaccagcgaactctcagaaataaatcacagatgcatatagacacacatacataatggtactcccaaactgacaattttacctattctgaaaaagacataaaacagaatt

SEQ ID NO: 12 - protein, 583 aa, Homo sapiens
MESKGASSCRLLFCLLISATVFRPGLGWYTVNSAYGDTIIIPCRLDVPQNLMFGKWKYEKPDGSPVFIAFRSSTKKSVQYDDVPEYKDRLNLSENYTLSISNARISDEKRFVCMLVTEDNVFEAPTIVKVFKQPSKPEIVSKALFLETEQLKKLGDCISEDSYPDGNITWYRNGKVLHPLEGAVVIIFKKEMDPVTQLYTMTSTLEYKTTKADIQMPFTCSVTYYGPSGQKTIHSEQAVFDIYYPTEQVTIQVLPPKNAIKEGDNITLKCLGNGNPPPEEFLFYLPGQPEGIRSSNTYTLMDVRRNATGDYKCSLIDKKSMIASTAITVHYLDLSLNPSGEVTRQIGDALPVSCTISASRNATVVWMKDNIRLRSSPSFSSLHYQDAGNYVCETALQEVEGLKKRESLTLIVEGKPQIKMTKKTDPSGLSKTIICHVEGFPKPAIQWTITGSGSVINQTEESPYINGRYYSKIIISPEENVTLTCTAENQLERTVNSLNVSAISIPEHDEADEISDENREKVNDQAKLIVGIVVGLLLAALVAGVVYWLYMKKSKTASKHVNKDLGNMEENKKLEENNHKTEA

SEQ ID NO: 13 - DNA, 3442 bp, Homo sapiens
agccggtgcgccgcagactagggcgcctcgggccagggagcgcggaggagccatggccaccgctaacggggccgtggaaaacgggcagccggacgggaagccgccggccctgccgcgccccatccgcaacctggaggtcaagttcaccaagatatttatcaacaatgaatggcacgaatccaagagtgggaaaaagtttgctacatgtaacccttcaactcgggagcaaatatgtgaagtggaagaaggagataagcccgacgtggacaaggctgtggaggctgcacaggttgccttccagaggggctcgccatggcgccggctggatgccctgagtcgtgggcggctgctgcaccagctggctgacctggtggagagggaccgcgccaccttggccgccctggagacgatggatacagggaagccatttcttcatgcttttttcatcgacctggagggctgtattagaaccctcagatactttgcagggtgggcagacaaaatccagggcaagaccatccccacagatgacaacgtcgtatgcttcaccaggcatgagcccattggtgtctgtggggccatcactccatggaacttccccctgctgatgctggtgtggaagctggcacccgccctctgctgtgggaacaccatggtcctgaagcctgcggagcagacacctctcaccgccctttatctcggctctctgatcaaagaggccgggttccctccaggagtggtgaacattgtgccaggattcgggcccacagtgggagcagcaatttcttctcaccctcagatcaacaagatcgccttcaccggctccacagaggttggaaaactggttaaagaagctgcgtcccggagcaatctgaagcgggtgacgctggagctgggggggaagaacccctgcatcgtgtgtgcggacgctgacttggacttggcagtggagtgtgcccatcagggagtgttcttcaaccaaggccagtgttgcacggcagcctccagggtgttcgtggaggagcaggtctactctgagtttgtcaggcggagcgtggagtatgccaagaaacggcccgtgggagaccccttcgatgtcaaaacagaacaggggcctcagattgatcaaaagcagttcgacaaaatcttagagctgatcgagagtgggaagaaggaaggggccaagctggaatgcgggggctcagccatggaagacaaggggctcttcatcaaacccactgtcttctcagaagtcacagacaacatgcggattgccaaagaggagattttcgggccagtgcaaccaatactgaagttcaaaagtatcgaagaagtgataaaaagagcgaatagcaccgactatggactcacagcagccgtgttcacaaaaaatctcgacaaagccctgaagttggcttctgccttagagtctggaacggtctggatcaactgctacaacgccctctatgcacaggctccatttggtggctttaaaatgtcaggaaatggcagagaactaggtgaatacgctttggccgaatacacagaagtgaaaactgtcaccatcaaacttggcgacaagaacccctgaaggaaaggcggggctccttcctcaaacatcggacggcggaatgtggcagatgaaatgtgctggaggaaaaaaatgacatttctgaccttcccgggacacattcttctggaggctttacatctactggagttgaatgattgctgttttcctctcactctcctgtttattcaccagactggggatgcctataggttgtctgtgaaatcgcagtcctgcctggggagggagctgttggccatttctgtgtttccctttaaaccagatcctggagacagtgagatactcagggcgttgttaacagggagtggtatttgaagtgtccagcagttgcttgaaatgctttgccgaatctgactccagtaagaatgtgggaaaaccccctgtgtgttctgcaagcagggctcttgcaccagcggtctcctcagggtggacctgcttacagagcaagccacgcctctttccgaggtgaaggtgggaccattccttgggaaaggattcacagtaaggttttttggtttttgttttttgttttcttgtttttaaaaaaaggatttcacagtgagaaagttttggttagtgcataccgtggaagggcgccagggtctttgtggattgcatgttgacattgaccgtgagattcggcttcaaaccaatactgcctttggaatatgacagaatcaatagcccagagagcttagtcaaagacgatatcacggtctaccttaaccaaggcactttcttaagcagaaaatattgttgaggttacctttgctgctaaagatccaatcttctaacgccacaacagcatagcaaatcctaggataattcacctcctcatttgacaaatcagagctgtaattcactttaacaaattacgcatttctatcacgttcactaacagcttatgataagtctgtgtagtcttccttttctccagttctgttacccaatttagattagtaaagcgtacacaactggaaagactgctgtaataacacagccttgttatttttaagtcctattttgatattaatttctgattagttagtaaataacacctggattctatggaggacctcggtcttcatccaagtggcctgagtatttcactggcaggttgtgaatttttcttttcctctttgggaatccaaatgatgatgtgcaatttcatgttttaacttgggaaactgaaagtgttcccatatagcttcaaaaacaaaaacaaatgtgttatccgacggatacttttatggttactaactagtactttcctaattgggaaagtagtgcttaagtttgcaaattaagttggggagggcaataataaaatgagggcccgtaacagaaccagtgtgtgtataacgaaaaccatgtataaaatgggcctatcacccttgtcagagatataaattaccacatttggcttcccttcatcagctaacacttatcacttatactaccaataacttgttaaatcaggatttggcttcatacactgaattttcagtattttatctcaagtagatatagacactaaccttgatagtgatacgttagagggttcctattcttccattgtacgataatgtctttaatatgaaatgctacattatttataattggtagagttattgtatctttttatagttgtaagtacacagaggtggtatatttaaacttctgtaatatactgtatttagaaatggaaatatatatagtgttaggtttcacttcttttaaggtttacccctgtggtgtggtttaaaaatctataggcctgggaattccgatcctagctgcagatcgcatcccacaatgcgagaatgataaaataaaattggatatttgaga

SEQ ID NO: 14 - protein, 512 aa, Homo sapiens
MATANGAVENGQPDGKPPALPRPIRNLEVKFTKIFINNEWHESKSGKKFATCNPSTREQICEVEEGDKPDVDKAVEAAQVAFQRGSPWRRLDALSRGRLLHQLADLVERDRATLAALETMDTGKPFLHAFFIDLEGCIRTLRYFAGWADKIQGKTIPTDDNVVCFTRHEPIGVCGAITPWNFPLLMLVWKLAPALCCGNTMVLKPAEQTPLTALYLGSLIKEAGFPPGVVNIVPGFGPTVGAAISSHPQINKIAFTGSTEVGKLVKEAASRSNLKRVTLELGGKNPCIVCADADLDLAVECAHQGVFFNQGQCCTAASRVFVEEQVYSEFVRRSVEYAKKRPVGDPFDVKTEQGPQIDQKQFDKILELIESGKKEGAKLECGGSAMEDKGLFIKPTVFSEVTDNMRIAKEEIFGPVQPILKFKSIEEVIKRANSTDYGLTAAVFTKNLDKALKLASALESGTVWINCYNALYAQAPFGGFKMSGNGRELGEYALAEYTEVKTVTIKLGDKNP

SEQ ID NO: 15 - DNA, 1722 bp, Homo sapiens
gcggccggtcgaccggagtggctgccctgcgcggggacactcagagcccggtgggcgggaggaaggcggcatgccccagacggtgatcctcccgggccctgcgccctggggcttcaggctctcagggggcatagacttcaaccagcctttggtcatcaccaggattacaccaggaagcaaggcggcagctgccaacctgtgtcctggagatgtcatcctggctattgacggctttgggacagagtccatgactcatgctgatgcgcaggacaggattaaagcagcagctcaccagctgtgtctcaaaattgacaggggagaaactcacttatggtctccacaagtatctgaagatgggaaagcccatcctttcaaaatcaacttagaatcagaaccacaggacgggaactactttgaacacaagcataatattcggcccaaacctttcgtgatcccgggccgaagcagtggatgcagcactccctccgggattgactgtggcagtggacgcagcaccccttcttctgtcagtactgttagtaccatttgcccaggtgacttgaaagttgcggctaagctggcccctaacattcctttggaaatggaacttcctggtgtgaagattgtacatgctcagtttaatacacctatgcagttgtactcagatgacaatattatggaaacactccagggtcaggtttcaacagccctaggggaaacacctttgatgaacgagcccacagcctcggtgccccccgagtcggacgtgtaccggatgctccacgacaatcggaatgagcccacacagcctcgccagtcgggctccttcagagtgctccagggaatggtggacgatggctctgatgaccgtccggctggaacgcggagtgtgagagctccggtgacgaaagtccatggcggttcaggcggggcacagaggatgccgctctgtgacaaatgtgggagtggcatagttggtgctgtggtgaaggcgcgggataagtaccggcaccctgagtgcttcgtgtgtgccgactgcaacctcaacctcaagcaaaagggctacttcttcatagaaggggagctgtactgcgaaacccacgcaagagcccgcacaaagcccccagagggctatgacacggtcactctgtatcccaaagcttaagtctctgcaggcgtggcacgcacgcacgcacccacccacgcgcacttacacgagaagacattcatggctttgggcagaaggattgtgcagattgtcaactccaaatctaaagtcaaggctttagacctttatcctattgtttattgaggaaaaggaatgggaggcaaatgcctgctatgtgaaaaaaacatacacttagctatgttttgcaactctttttggggctagcaataatgatatttaaagcaataattttttgtatgtcatactccacaatttacatgtatattacagccatcaaacacataaacatcaagatatttgaaggactctaattgtctttccttgacaagttgattttgcaattgtggtaaatagcaaataacaatcttgtattctaacataatctgcagttgtctgtatgtgttttaactattacagtgcatgttagggagaaattccctgaatttctttagttttgtattcaaacaattatgccactcgatgcaacaaacataataaatacataaaggatttaaaaaaaaaaaaaaaaaaaa

SEQ ID NO: 16 - protein, 364 aa, Homo sapiens
MPQTVILPGPAPWGFRLSGGIDFNQPLVITRITPGSKAAAANLCPGDVILAIDGFGTESMTHADAQDRIKAAAHQLCLKIDRGETHLWSPQVSEDGKAHPFKINLESEPQDGNYFEHKHNIRPKPFVIPGRSSGCSTPSGIDCGSGRSTPSSVSTVSTICPGDLKVAAKLAPNIPLEMELPGVKIVHAQFNTPMQLYSDDNIMETLQGQVSTALGETPLMNEPTASVPPESDVYRMLHDNRNEPTQPRQSGSFRVLQGMVDDGSDDRPAGTRSVRAPVTKVHGGSGGAQRMPLCDKCGSGIVGAVVKARDKYRHPECFVCADCNLNLKQKGYFFIEGELYCETHARARTKPPEGYDTVTLYPKA

SEQ ID NO: 17 - DNA, 2069 bp, Homo sapiens
gggcgccgggattgggagggcttcttgcaggctgctgggctggggctaagggctgctcagtttccttcagcggggcactgggaagcgccatggcactgcagggcatctcggtcgtggagctgtccggcctggccccgggcccgttctgtgctatggtcctggctgacttcggggcgcgtgtggtacgcgtggaccggcccggctcccgctacgacgtgagccgcttgggccggggcaagcgctcgctagtgctggacctgaagcagccgcggggagccgccgtgctgcggcgtctgtgcaagcggtcggatgtgctgctggagcccttccgccgcggtgtcatggagaaactccagctgggcccagagattctgcagcgggaaaatccaaggcttatttatgccaggctgagtggatttggccagtcaggaagcttctgccggttagctggccacgatatcaactatttggctttgtcaggtgttctctcaaaaattggcagaagtggtgagaatccgtatgccccgctgaatctcctggctgactttgctggtggtggccttatgtgtgcactgggcattataatggctctttttgaccgcacacgcactggcaagggtcaggtcattgatgcaaatatggtggaaggaacagcatatttaagttcttttctgtggaaaactcagaaatcgagtctgtgggaagcacctcgaggacagaacatgttggatggtggagcacctttctatacgacttacaggacagcagatggggaattcatggctgttggagcaatagaaccccagttctacgagctgctgatcaaaggacttggactaaagtctgatgaacttcccaatcagatgagcatggatgattggccagaaatgaagaagaagtttgcagatgtatttgcaaagaagacgaaggcagagtggtgtcaaatctttgacggcacagatgcctgtgtgactccggttctgacttttgaggaggttgttcatcatgatcacaacaaggaacggggctcgtttatcaccagtgaggagcaggacgtgagcccccgccctgcacctctgctgttaaacaccccagccatcccttctttcaaaagggatcctttcataggagaacacactgaggagatacttgaagaatttggattcagccgcgaagagatttatcagcttaactcagataaaatcattgaaagtaataaggtaaaagctagtctctaacttccaggcccacggctcaagtgaatttgaatactgcatttacagtgtagagtaacacataacattgtatgcatggaaacatggaggaacagtattacagtgtcctaccactctaatcaagaaaagaattacagactctgattctacagtgatgattgaattctaaaaatggttatcattagggcttttgatttataaaactttgggtacttatactaaattatggtagttattctgccttccagtttgcttgatatatttgttgatattaagattcttgacttatattttgaatgggttctagtgaaaaaggaatgatatattcttgaagacatcgatatacatttatttacactcttgattctacaatgtagaaaatgaggaaatgccacaaattgtatggtgataaaagtcacgtgaaacagagtgattggttgcatccaggccttttgtcttggtgttcatgatctccctctaagcacattccaaactttagcaacagttatcacactttgtaatttgcaaagaaaagtttcacctgtattgaatcagaatgccttcaactgaaaaaaacatatccaaaataatgaggaaatgtgttggctcactacgtagagtccagagggacagtcagttttagggttgcctgtatccagtaactcggggcctgtttccccgtgggtctctgggctgtcagctttcctttctccatgtgtttgatttctcctcaggctggtagcaagttctggatcttatacccaacacacagcaacatccagaaataaagatctcaggaccccccaaaaaaaaaaaaaaaaaaaaaaaaaaaaa

SEQ ID NO: 18 - protein, 382 aa, Homo sapiens
MALQGISVVELSGLAPGPFCAMVLADFGARVVRVDRPGSRYDVSRLGRGKRSLVLDLKQPRGAAVLRRLCKRSDVLLEPFRRGVMEKLQLGPEILQRENPRLIYARLSGFGQSGSFCRLAGHDINYLALSGVLSKIGRSGENPYAPLNLLADFAGGGLMCALGIIMALFDRTRTGKGQVIDANMVEGTAYLSSFLWKTQKSSLWEAPRGQNMLDGGAPFYTTYRTADGEFMAVGAIEPQFYELLIKGLGLKSDELPNQMSMDDWPEMKKKFADVFAKKTKAEWCQIFDGTDACVTPVLTFEEVVHHDHNKERGSFITSEEQDVSPRPAPLLLNTPAIPSFKRDPFIGEHTEEILEEFGFSREEIYQLNSDKIIESNKVKASL

SEQ ID NO: 19 - DNA, 3654 bp, Homo sapiens
gggcgccgggattgggagggcttcttgcaggctgctgggctggggctaagggctgctcagtttccttcagcggggcactgggaagcgccatggcactgcagggcatctcggtcgtggagctgtccggcctggccccgggcccgttctgtgctatggtcctggctgacttcggggcgcgtgtggtacgcgtggaccggcccggctcccgctacgacgtgagccgcttgggccggggcaagcgctcgctagtgctggacctgaagcagccgcggggagccgccgtgctgcggcgtctgtgcaagcggtcggatgtgctgctggagcccttccgccgcggtgtcatggagaaactccagctgggcccagagattctgcagcgggaaaatccaaggcttatttatgccaggctgagtggatttggccagtcaggaagcttctgccggttagctggccacgatatcaactatttggctttgtcaggtgttctctcaaaaattggcagaagtggtgagaatccgtatgccccgctgaatctcctggctgactttgctggtggtggccttatgtgtgcactgggcattataatggctctttttgaccgcacacgcactggcaagggtcaggtcattgatgcaaatatggtggaaggaacagcatatttaagttcttttctgtggaaaactcagaaatcgagtctgtgggaagcacctcgaggacagaacatgttggatggtggagcacctttctatacgacttacaggacagcagatggggaattcatggctgttggagcaatagaaccccagttctacgagctgctgatcaaaggacttggactaaagtctgatgaacttcccaatcagatgagcatggatgattggccagaaatgaagaagaagtttgcagatgtatttgcaaagaagacgaaggcagagtggtgtcaaatctttgacggcacagatgcctgtgtgactccggttctgacttttgaggaggttgttcatcatgatcacaacaaggaacggggctcgtttatcaccagtgaggagcaggacgtgagcccccgccctgcacctctgctgttaaacaccccagccatcccttctttcaaaagggatcctttcataggagaacacactgaggagatacttgaagaatttggattcagccgcgaagagatttatcagcttaactcagataaaatcattgaaagtaataaggctggtagcaagttctggatcttatacccaacacacagcaacatccagaaataaagatctcaggaccccccagcaagtcgttttgtgtctccttggactgagttaagttacaagcctttcttatacctgtctttgacaaagaagacgggattgtctttacataaaaccagcctgctcctggagcttccctggactcaacttcctaaaggcatgtgaggaaggggtagattccacaatctaatccgggtgccatcagagtagagggagtagagaatggatgttgggtaggccatcaataaggtccattctgcgcagtatctcaactgccgttcaacaatcgcaagaggaaggtggagcaggtttcttcatcttacagttgagaaaacagagactcagaagggcttcttagttcatgtttcccttagcgcctcagtgattttttcatggtggcttaggccaaaagaaatatctaaccattcaatttataaataattaggtccccaacgaattaaatattatgtcctaccaacttattagctgcttgaaaaatataatacacataaataaaaaaatatatttttcatttctatttcattgttaatcacaactacttactaaggagatgtatgcacctattggacactgtgcaacttctcacctggaatgagattggacactgctgccctcattttctgctccatgttggtgtccatatagtacttgattttttatcagatggcctggaaaacccagtctcacaaaaatatgaaattatcagaaggattatagtgcaatcttatgttgaaagaatgaactacctcactagtagttcacgtgatgtctgacagatgttgagtttcattgtgtttgtgtgttcaaatttttaaatattctgagatactcttgtgaggtcactctaatgccctgggtgccttggcacagttttagaaataccagttgaaaatatttgctcaggaatatgcaactaggaaggggcagaatcagaatttaagctttcatattctagccttcagtcttgttcttcaaccatttttaggaactttcccataaggttatgttttccagcccaggcatggaggatcacttgaggccaagagttcgagaccagcctggggaacttggctggacctccgtttctacgaaataaaaataaaaaaattatccaggtatggtggtgtgtgcctgtagtcctatctactcaagggtggggcaggaggatcacttgagcccaggaatttgaggccacagtgaattaggattgcaccactgcactctagcccaggcaacagaacaagaacctgtctctaaataaataaataaaaataataataataaaaaagatgttttccctacaaaaaagacttttcatttgaactcggtccagcaaggaaaatataacccactcgaagtctttaaaacagaggaaatttaatataaagaattccactggtgacgaaagagcagagaagcccagaagatagtgaggcaaccctgataggaacataactaggaagccaagaccactcctatggttgcaggggtgatgggaaagctggtgtacttggacccagaagccaaagttgctgcacccaccttggagacatagacactggcagtaatacctcagggagaagaaagaaatctagggaaatatcctggcttctttccttctctctctcccctagtcttcctaccagtgtctcccattagccaaatctacctagaagccagaaaacaagggaaccctggaaatgtagccccataagataaagagcaccaaaggaaatagatctgagcagacaggcagcacaaaatgcagtgtgtatggtttattcactcagtaattcctttagcaaatgtttattgaggatctactaggtgccaggtatcatgatacttgctggggataccataatgaacaaaacagacctgttctccgctcttgaggaaatcaaagacaaacacaggatatggaataaacccagaattatctcattgtaaaatgtgttaagtaccacgaggagaaatatcagggccatctgacacagctaatgatttgaagaagggtgtgacctgccaccattttaaatctagttatttcactcctgagctgtgtgtgtggaaaacttgtagtaaaaaatagaatgtctatatttataaaaagtttatgaaaagatatcaatttatttacattttgacaaactctatgtaataaggctttattactcacggccatgtgtgtgatcatgtgtaatagcatgtgtgtatgagagagagaagccatatgtaattatgtgtaataacgtctgtgagagagaagccatgtgtgtgatcatgtaaaataacgtgtgtgagagaagccatgtgtgtgatcgtgtaaaataacgtgtgtgagaagccgtgtgtgatgtgt

SEQ ID NO: 20 - protein, 394 aa, Homo sapiens
MALQGISVVELSGLAPGPFCAMVLADFGARVVRVDRPGSRYDVSRLGRGKRSLVLDLKQPRGAAVLRRLCKRSDVLLEPFRRGVMEKLQLGPEILQRENPRLIYARLSGFGQSGSFCRLAGHDINYLALSGVLSKIGRSGENPYAPLNLLADFAGGGLMCALGIIMALFDRTRTDKGQVIDANMVEGTAYLSSFLWKTQKSSLWEAPRGQNMLDGGAPFYTTYRTADGEFMAVGAIEPQFYELLIKGLGLKSDELPNQMSMDDWPEMKKKFADVFAKKTKAEWCQIFDGTDACVTPVLTFEEVVHHDHNKERGSFITSEEQDVSPRPAPLLLNTPAIPSFKRDPFIGEHTEEILEEFGFSREEIYQLNSDKIIESNKAGSKFWILYPTHSNIQK

SEQ ID NO: 21 - DNA, 3023 bp, Homo sapiens
gggcgccgggattgggagggcttcttgcaggctgctgggctggggctaagggctgctcagtttccttcagcggggcactgggaagcgccatggcactgcagggcatctcggtcgtggagctgtccggcctggccccgggcccgttctgtgctatggtcctggctgacttcggggcgcgtgtggtacgcgtggaccggcccggctcccgctacgacgtgagccgcttgggccggggcaagcgctcgctagtgctggacctgaagcagccgcggggagccgccgtgctgcggcgtctgtgcaagcggtcggatgtgctgctggagcccttccgccgcggtgtcatggagaaactccagctgggcccagagattctgcagcgggaaaatccaaggcttatttatgccaggctgagtggatttggccagtcaggaagcttctgccggttagctggccacgatatcaactatttggctttgtcaggtggaaggaacagcatatttaagttcttttctgtggaaaactcagaaatcgagtctgtgggaagcacctcgaggacagaacatgttggatggtggagcacctttctatacgacttacaggacagcagatggggaattcatggctgttggagcaatagaaccccagttctacgagctgctgatcaaaggacttggactaaagtctgatgaacttcccaatcagatgagcatggatgattggccagaaatgaagaagaagtttgcagatgtatttgcaaagaagacgaaggcagagtggtgtcaaatctttgacggcacagatgcctgtgtgactccggttctgacttttgaggaggttgttcatcatgatcacaacaaggaacggggctcgtttatcaccagtgaggagcaggacgtgagcccccgccctgcacctctgctgttaaacaccccagccatcccttctttcaaaagggatcctttcataggagaacacactgaggagatacttgaagaatttggattcagccgcgaagagatttatcagcttaactcagataaaatcattgaaagtaataaggtaaaagctagtctctaacttccaggcccacggctcaagtgaatttgaatactgcatttacagtgtagagtaacacataacattgtatgcatggaaacatggaggaacagtattacagtgtcctaccactctaatcaagaaaagaattacagactctgattctacagtgatgattgaattctaaaaatggttatcattagggcttttgatttataaaactttgggtacttatactaaattatggtagttattctgccttccagtttgcttgatatatttgttgatattaagattcttgacttatattttgaatgggttctagtgaaaaaggaatgatatattcttgaagacatcgatatacatttatttacactcttgattctacaatgtagaaaatgaggaaatgccacaaattgtatggtgataaaagtcacgtgaaacagagtgattggttgcatccaggccttttgtcttggtgttcatgatctccctctaagcacattccaaactttagcaacagttatcacactttgtaatttgcaaagaaaagtttcacctgtattgaatcagaatgccttcaactgaaaaaaacatatccaaaataatgaggaaatgtgttggctcactacgtagagtccagagggacagtcagttttagggttgcctgtatccagtaactcggggcctgtttccccgtgggtctctgggctgtcagctttcctttctccatgtgtttgatttctcctcaggctggtagcaagttctggatcttatacccaacacacagcaacatccagaaataaagatctcaggaccccccagcaagtcgttttgtgtctccttggactgagttaagttacaagcctttcttatacctgtctttgacaaagaagacgggattgtctttacataaaaccagcctgctcctggagcttccctggactcaacttcctaaaggcatgtgaggaaggggtagattccacaatctaatccgggtgccatcagagtagagggagtagagaatggatgttgggtaggccatcaataaggtccattctgcgcagtatctcaactgccgttcaacaatcgcaagaggaaggtggagcaggtttcttcatcttacagttgagaaaacagagactcagaagggcttcttagttcatgtttcccttagcgcctcagtgattttttcatggtggcttaggccaaaagaaatatctaaccattcaatttataaataattaggtccccaacgaattaaatattatgtcctaccaacttattagctgcttgaaaaatataatacacataaataaaaaaatatatttttcatttctatttcattgttaatcacaactacttactaaggagatgtatgcacctattggacactgtgcaacttctcacctggaatgagattggacactgctgccctcattttctgctccatgttggtgtccatatagtacttgattttttatcagatggcctggaaaacccagtctcacaaaaatatgaaattatcagaaggattatagtgcaatcttatgttgaaagaatgaactacctcactagtagttcacgtgatgtctgacagatgttgagtttcattgtgtttgtgtgttcaaatttttaaatattctgagatactcttgtgaggtcactctaatgccctgggtgccttggcacagttttagaaataccagttgaaaatatttgctcaggaatatgcaactaggaaggggcagaatcagaatttaagctttcatattctagccttcagtcttgttcttcaaccatttttaggaactttcccataaggttatgttttccagcccaggcatggaggatcacttgaggccaagagttcgagaccagcctggggaacttggctggacctccgtttctacgaaataaaaataaaaaaattatccaggaaaaaaaaaaaaaaaaaaaaaaaaaaa

SEQ ID NO: 22 - protein, 198 aa, Homo sapiens
MALQGISVVELSGLAPGPFCAMVLADFGARVVRVDRPGSRYDVSRLGRGKRSLVLDLKQPRGAAVLRRLCKRSDVLLEPFRRGVMEKLQLGPEILQRENPRLIYARLSGFGQSGSFCRLAGHDINYLALSGGRNSIFKFFSVENSEIESVGSTSRTEHVGWWSTFLYDLQDSRWGIHGCWSNRTPVLRAADQRTWTKV

SEQ ID NO: 23 - DNA, 1316 bp, Homo sapiens
ttgcaggctgctgggctggggctaagggctgctcagtttccttcagcggggcactgggaagcgccatggcactgcagggcatctcggtcgtggagctgtccggcctggccccgggcccgttctgtgctatggtcctggctgacttcggggcgcgtgtggtacgcgtggaccggcccggctcccgctacgacgtgagccgcttgggccggggcaagcgctcgctagtgctggacctgaagcagccgcggggagccgccgtgctgcggcgtctgtgcaagcggtcggatgtgctgctggagcccttccgccgcggtgtcatggagaaactccagctgggcccagagattctgcagcgggaaaatccaaggcttatttatgccaggctgagtggatttggccagtcaggaagcttctgccggttagctggccacgatatcaactatttggctttgtcaggtgttctctcaaaaattggcagaagtggtgagaatccgtatgccccgctgaatctcctggctgactttgctggtggtggccttatgtgtgcactgggcattataatggctctttttgaccgcacacgcactggcaagggtcaggtcattgatgcaaatatggtggaaggaacagcatatttaagttcttttctgtggaaaactcagaaatcgagtctgtgggaagcacctcgaggacagaacatgttggatggtggagcacctttctatacgacttacaggacagcagatggggaattcatggctgttggagcaatagaaccccagttctacgagctgctgatcaaaggtctgggagaactgatcttgctgaaaatacaacaggaagcagtatcgtgccaggcaaggcaaaccctcgtcagtgtgaagcaatggccatcgttgcagcccaagtcatggggttttgtgtggcagtaaccgttggaggcggcaatggccattttgagttggatgttttcaagccaatgatgattaaaaatttatgttacactcaggctgctgggggatgcttcagtttccttcacagaaaactaaatagtgggaatccggaccaataaagaaaggatcaagaagctaatgaattagtcgctaatgctggtgacagctctcaaccctcatatagggtatgacaaaacagcagaattgctaagacaacaccccaaaatggatcaaccttaaaggaaactgccgttgaacttggctctctcacagcagagcagtttgatgaatgggtaaaacctaaggacatgctgggtccaaagtgacttaaataagttttaatgaaaataaacgtgtaaaatt

SEQ ID NO: 24 - protein, 288 aa, Homo sapiens
MALQGISVVELSGLAPGPFCAMVLADFGARVVRVDRPGSRYDVSRLGRGKRSLVLDLKQPRGAAVLRRLCKRSDVLLEPFRRGVMEKLQLGPEILQRENPRLIYARLSGFGQSGSFCRLAGHDINYLALSGVLSKIGRSGENPYAPLNLLADFAGGGLMCALGIIMALFDRTRTGKGQVIDANMVEGTAYLSSFLWKTQKSSLWEAPRGQNMLDGGAPFYTTYRTADGEFMAVGAIEPQFYELLIKGLGELILLKIQQEAVSCQARQTLVSVKQWPSLQPKSWGFVWQ

SEQ ID NO: 25 - DNA, 2069 bp, Homo sapiens
gggcgccgggattgggagggcttcttgcaggctgctgggctggggctaagggctgctcagtttccttcagcggggcactgggaagcgccatggcactgcagggcatctcggtcgtggagctgtccggcctggccccgggcccgttctgtgctatggtcctggctgacttcggggcgcgtgtggtacgcgtggaccggcccggctcccgctacgacgtgagccgcttgggccggggcaagcgctcgctagtgctggacctgaagcagccgcggggagccgccgtgctgcggcgtctgtgcaagcggtcggatgtgctgctggagcccttccgccgcggtgtcatggagaaactccagctgggcccagagattctgcagcgggaaaatccaaggcttatttatgccaggctgagtggatttggccagtcaggaagcttctgccggttagctggccacgatatcaactatttggctttgtcaggtgttctctcaaaaattggcagaagtggtgagaatccgtatgccccgctgaatctcctggctgactttgctggtggtggccttatgtgtgcactgggcattataatggctctttttgaccgcacacgcactgacaagggtcaggtcattgatgcaaatatggtggaaggaacagcatatttaagttcttttctgtggaaaactcagaaatcgagtctgtgggaagcacctcgaggacagaacatgttggatggtggagcacctttctatacgacttacaggacagcagatggggaattcatggctgttggagcaatagaaccccagttctacgagctgctgatcaaaggacttggactaaagtctgatgaacttcccaatcagatgagcatggatgattggccagaaatgaagaagaagtttgcagatgtatttgcaaagaagacgaaggcagagtggtgtcaaatctttgacggcacagatgcctgtgtgactccggttctgacttttgaggaggttgttcatcatgatcacaacaaggaacggggctcgtttatcaccagtgaggagcaggacgtgagcccccgccctgcacctctgctgttaaacaccccagccatcccttctttcaaaagggatcctttcataggagaacacactgaggagatacttgaagaatttggattcagccgcgaagagatttatcagcttaactcagataaaatcattgaaagtaataaggtaaaagctagtctctaacttccaggcccacggctcaagtgaatttgaatactgcatttacagtgtagagtaacacataacattgtatgcatggaaacatggaggaacagtattacagtgtcctaccactctaatcaagaaaagaattacagactctgattctacagtgatgattgaattctaaaaatggttatcattagggcttttgatttataaaactttgggtacttatactaaattatggtagttattctgccttccagtttgcttgatatatttgttgatattaagattcttgacttatattttgaatgggttctagtgaaaaaggaatgatatattcttgaagacatcgatatacatttatttacactcttgattctacaatgtagaaaatgaggaaatgccacaaattgtatggtgataaaagtcacgtgaaacagagtgattggttgcatccaggccttttgtcttggtgttcatgatctccctctaagcacattccaaactttagcaacagttatcacactttgtaatttgcaaagaaaagtttcacctgtattgaatcagaatgccttcaactgaaaaaaacatatccaaaataatgaggaaatgtgttggctcactacgtagagtccagagggacagtcagttttagggttgcctgtatccagtaactcggggcctgtttccccgtgggtctctgggctgtcagctttcctttctccatgtgtttgatttctcctcaggctggtagcaagttctggatcttatacccaacacacagcaacatccagaaataaagatctcaggaccccccaaaaaaaaaaaaaaaaaaaaaaaaaaaaa

SEQ ID NO: 26 - protein, 382 aa, Homo sapiens
MALQGISVVELSGLAPGPFCAMVLADFGARVVRVDRPGSRYDVSRLGRGKRSLVLDLKQPRGAAVLRRLCKRSDVLLEPFRRGVMEKLQLGPEILQRENPRLIYARLSGFGQSGSFCRLAGHDINYLALSGVLSKIGRSGENPYAPLNLLADFAGGGLMCALGIIMALFDRTRTDKGQVIDANMVEGTAYLSSFLWKTQKSSLWEAPRGQNMLDGGAPFYTTYRTADGEFMAVGAIEPQFYELLIKGLGLKSDELPNQMSMDDWPEMKKKFADVFAKKTKAEWCQIFDGTDACVTPVLTFEEVVHHDHNKERGSFITSEEQDVSPRPAPLLLNTPAIPSFKRDPFIGEHTEEILEEFGFSREEIYQLNSDKIIESNKVKASL

SEQ ID NO: 27 - DNA, 2626 bp, Homo sapiens
gggcgccgggattgggagggcttcttgcaggctgctgggctggggctaagggctgctcagtttccttcagcggggcactgggaagcgccatggcactgcagggcatctcggtcgtggagctgtccggcctggccccgggcccgttctgtgctatggtcctggctgacttcggggcgcgtgtggtacgcgtggaccggcccggctcccgctacgacgtgagccgcttgggccggggcaagcgctcgctagtgctggacctgaagcagccgcggggagccgccgtgctgcggcgtctgtgcaagcggtcggatgtgctgctggagcccttccgccgcggtgtcatggagaaactccagctgggcccagagattctgcagcgggaaaatccaaggcttatttatgccaggctgagtggatttggccagtcaggaagcttctgccggttagctggccacgatatcaactatttggctttgtcaggtgttctctcaaaaattggcagaagtggtgagaatccgtatgccccgctgaatctcctggctgactttgctggtggtggccttatgtgtgcactgggcattataatggctctttttgaccgcacacgcactgacaagggtcaggtcattgatgcaaatatggtggaaggaacagcatatttaagttcttttctgtggaaaactcagaaatcgagtctgtgggaagcacctcgaggacagaacatgttggatggtggagcacctttctatacgacttacaggacagcagatggggaattcatggctgttggagcaatagaaccccagttctacgagctgctgatcaaaggacttggactaaagtctgatgaacttcccaatcagatgagcatggatgattggccagaaatgaagaagaagtttgcagatgtatttgcaaagaagacgaaggcagagtggtgtcaaatctttgacggcacagatgcctgtgtgactccggttctgacttttgaggaggttgttcatcatgatcacaacaaggaacggggctcgtttatcaccagtgaggagcaggacgtgagcccccgccctgcacctctgctgttaaacaccccagccatcccttctttcaaaagggatcctttcataggagaacacactgaggagatacttgaagaatttggattcagccgcgaagagatttatcagcttaactcagataaaatcattgaaagtaataaggctggtagcaagttctggatcttatacccaacacacagcaacatccagaaataaagatctcaggaccccccagcaagtcgttttgtgtctccttggactgagttaagttacaagcctttcttatacctgtctttgacaaagaagacgggattgtctttacataaaaccagcctgctcctggagcttccctggactcaacttcctaaaggcatgtgaggaaggggtagattccacaatctaatccgggtgccatcagagtagagggagtagagaatggatgttgggtaggccatcaataaggtccattctgcgcagtatctcaactgccgttcaacaatcgcaagaggaaggtggagcaggtttcttcatcttacagttgagaaaacagagactcagaagggcttcttagttcatgtttcccttagcgcctcagtgattttttcatggtggcttaggccaaaagaaatatctaaccattcaatttataaataattaggtccccaacgaattaaatattatgtcctaccaacttattagctgcttgaaaaatataatacacataaataaaaaaatatatttttcatttctatttcattgttaatcacaactacttactaaggagatgtatgcacctattggacactgtgcaacttctcacctggaatgagattggacactgctgccctcattttctgctccatgttggtgtccatatagtacttgattttttatcagatggcctggaaaacccagtctcacaaaaatatgaaattatcagaaggattatagtgcaatcttatgttgaaagaatgaactacctcactagtagttcacgtgatgtctgacagatgttgagtttcattgtgtttgtgtgttcaaatttttaaatattctgagatactcttgtgaggtcactctaatgccctggggtgccttggccaaggttttaggaaatacccagttgaaaatatttgctcagggaatatgcaactagggaagggggcagaatcaggaatttaagctttcatattctaggccttcagtcttggttctttcaaccatttttaggggaccctttcccataagggttatgttttcccagccccaggcatgggagggatcacttgaggcccaagagttcgagaccagccctggggaacttggctggaccctccgtttcctacgaaataaaaataaaaaaattatccccaggtatggtggtgtgtgcctgtagtcctatctactcaagggtggggcaggaggatcacttgagccccaggaatttgaggccacagtgaattaggattgcaccactgcactctagcccaggcaacagaacaagaacctgtctctaaataaataaataaaaataataataataaaaaagatgttttccctacaaaaaa

SEQ ID NO: 28 - protein, 394 aa, Homo sapiens; identical to SEQ ID NO: 20

SEQ ID NO: 29 - DNA, 2946 bp, Homo sapiens
ctgggaagcgccatggcactgcagggcatctcggtcatggagctgtccggcctggccccgggcccgttctgtgctatggtcctggctgacttcggggcgcgtgtggtacgcgtggaccggcccggctcccgctacgacgtgagccgcttgggccggggcaagcgctcgctagtgctggacctgaagcagccgcggggagccgccgtgctgcggcgtctgtgcaagcggtcggatgtgctgctggagcccttccgccgcggtgtcatggagaaactccagctgggcccagagattctgcagcgggaaaatccaaggcttatttatgccaggctgagtggatttggccagtcaggaagcttctgccggttagctggccacgatatcaactatttggctttgtcaggtggaaggaacagcatatttaagttcttttctgtggaaaactcagaaatcgagtctgtgggaagcacctcgaggacagaacatgttggatggtggagcacctttctatacgacttacaggacagcagatggggaattcatggctgttggagcaatagaaccccagttctacgagctgctgatcaaaggacttggactaaagtctgatgaacttcccaatcagatgagcatggatgattggccagaaatgaagaagaagtttgcagatgtatttgcaaagaagacgaaggcagagtggtgtcaaatctttgacggcacagatgcctgtgtgactccggttctgacttttgaggaggttgttcatcatgatcacaacaaggaacggggctcgtttatcaccagtgaggagcaggacgtgagcccccgccctgcacctctgctgttaaacaccccagccatcccttctttcaaaagggatcctttcataggagaacacactgaggagatacttgaagaatttggattcagccgcgaagagatttatcagcttaactcagataaaatcattgaaagtaataaggtaaaagctagtctctaacttccaggcccacggctcaagtgaatttgaatactgcatttacagtgtagagtaacacataacattgtatgcatggaaacatggaggaacagtattacagtgtcctaccactctaatcaagaaaagaattacagactctgattctacagtgatgattgaattctaaaaatggttatcattagggcttttgatttataaaactttgggtacttatactaaattatggtagttattctgccttccagtttgcttgatatatttgttgatattaagattcttgacttatattttgaatgggttctagtgaaaaaggaatgatatattcttgaagacatcgatatacatttatttacactcttgattctacaatgtagaaaatgaggaaatgccacaaattgtatggtgataaaagtcacgtgaaacagagtgattggttgcatccaggccttttgtcttggtgttcatgatctccctctaagcacattccaaactttagcaacagttatcacactttgtaatttgcaaagaaaagtttcacctgtattgaatcagaatgccttcaactgaaaaaaacatatccaaaataatgaggaaatgtgttggctcactacgtagagtccagagggacagtcagttttagggttgcctgtatccagtaactcggggcctgtttccccgtgggtctctgggctgtcagctttcctttctccatgtgtttgatttctcctcaggctggtagcaagttctggatcttatacccaacacacagcaacatccagaaataaagatctcaggaccccccagcaagtcgttttgtgtctccttggactgagttaagttacaagcctttcttatacctgtctttgacaaagaagacgggattgtctttacataaaaccagcctgctcctggagcttccctggactcaacttcctaaaggcatgtgaggaaggggtagattccacaatctaatccgggtgccatcagagtagagggagtagagaatggatgttgggtaggccatcaataaggtccattctgcgcagtatctcaactgccgttcaacaatcgcaagaggaaggtggagcaggtttcttcatcttacagttgagaaaacagagactcagaagggcttcttagttcatgtttcccttagcgcctcagtgattttttcatggtggcttaggccaaaagaaatatctaaccattcaatttataaataattaggtccccaacgaattaaatattatgtcctaccaacttattagctgcttgaaaaatataatacacataaataaaaaaatatatttttcatttctatttcattgttaatcacaactacttactaaggagatgtatgcacctattggacactgtgcaacttctcacctggaatgagattggacactgctgccctcattttctgctccatgttggtgtccatatagtacttgattttttatcagatggcctggaaaacccagtctcacaaaaatatgaaattatcagaaggattatagtgcaatcttatgttgaaagaatgaactacctcactagtagttcacgtgatgtctgacagatgttgagtttcattgtgtttgtgtgttcaaatttttaaatattctgagatactcttgtgaggtcactctaatgccctgggtgccttggcacagttttagaaataccagttgaaaatatttgctcaggaatatgcaactaggaaggggcagaatcagaatttaagctttcatattctagccttcagtcttgttcttcaaccattttcaggaactttcccataaggttatgttttccagcccaggcatggaggatcacttgaggccaagagttcgagaccagcctggggaacttggctggacctccgtttctacgaaataaaaataaaaaaattatccaggaaaaaaaaaaaaaaaaaaaaaaaaaaa

SEQ ID NO: 30 - protein, 198 aa, Homo sapiens [sequence omitted]

SEQ ID NO: 31 - DNA, 3494 bp, Homo sapiens
taatttttgcccagtctgcctgttgtggggctcctcccctttggggatataagcccggcctggggctgctccgttctctgcctggcctgaggctccctgagccgcctccccaccatcaccatggccaagggcttctatatttccaagtccctgggcatcctggggatcctcctgggcgtggcagccgtgtgcacaatcatcgcactgtcagtggtgtactcccaggagaagaacaagaacgccaacagctcccccgtggcctccaccaccccgtccgcctcagccaccaccaaccccgcctcggccaccaccttggaccaaagtaaagcgtggaatcgttaccgcctccccaacacgctgaaacccgattcctaccaggtgacgctgagaccgtacctcacccccaatgacaggggcctgtacgtttttaagggctccagcaccgtccgtttcacctgcaaggaggccactgacgtcatcatcatccacagcaagaagctcaactacaccctcagccaggggcacagggtggtcctgcgtggtgtgggaggctcccagccccccgacattgacaagactgagctggtggagcccaccgagtacctggtggtgcacctcaagggctccctggtgaaggacagccagtatgagatggacagcgagttcgagggggagttggcagatgacctggcgggcttctaccgcagcgagtacatggagggcaatgtcagaaaggtggtggccactacacagatgcaggctgcagatgcccggaagtccttcccatgcttcgatgagccggccatgaaggccgagttcaacatcacgcttatccaccccaaggacctgacagccctgtccaacatgcttcccaaaggtcccagcaccccacttccagaagaccccaactggaatgtcactgagttccacaccacgcccaagatgtccacgtacttgctggccttcattgtcagtgagttcgactacgtggagaagcaggcatccaatggtgtcttgatccggatctgggcccggcccagtgccattgcggcgggccacggcgattatgccctgaacgtgacgggccccatccttaacttctttgctggtcattatgacacaccctacccactcccaaaatcagaccagattggcctgccagacttcaacgccggcgccatggagaactggggactggtgacctaccgggagaactccctgctgttcgaccccctgtcctcctccagcagcaacaaggagcgggtggtcactgtgattgctcatgagctggcccaccagtggttcgggaacctggtgaccatagagtggtggaatgacctgtggctgaacgagggcttcgcctcctacgtggagtacctgggtgctgactatgcggagcccacctggaacttgaaagacctcatggtgctgaatgatgtgtaccgcgtgatggcagtggatgcactggcctcctcccacccgctgtccacacccgcctcggagatcaacacgccggcccagatcagtgagctgtttgacgccatctcctacagcaagggcgcctcagtcctcaggatgctctccagcttcctgtccgaggacgtattcaagcagggcctggcgtcctacctccacacctttgcctaccagaacaccatctacctgaacctgtgggaccacctgcaggaggctgtgaacaaccggtccatccaactccccaccaccgtgcgggacatcatgaaccgctggaccctgcagatgggcttcccggtcatcacggtggataccagcacggggaccctttcccaggagcacttcctccttgaccccgattccaatgttacccgcccctcagaattcaactacgtgtggattgtgcccatcacatccatcagagatggcagacagcagcaggactactggctgatagatgtaagagcccagaacgatctcttcagcacatcaggcaatgagtgggtcctgctgaacctcaatgtgacgggctattaccgggtgaactacgacgaagagaactggaggaagattcagactcagctgcagagagaccactcggccatccctgtcatcaatcgggcacagatcattaatgacgccttcaacctggccagtgcccataaggtccctgtcactctggcgctgaacaacaccctcttcctgattgaagagagacagtacatgccctgggaggccgccctgagcagcctgagctacttcaagctcatgtttgaccgctccgaggtctatggccccatgaagaactacctgaagaagcaggtcacacccctcttcattcacttcagaaataataccaacaactggagggagatcccagaaaacctgatggaccagtacagcgaggttaatgccatcagcaccgcctgctccaacggagttccagagtgtgaggagatggtctctggccttttcaagcagtggatggagaaccccaataataacccgatccaccccaacctgcggtccaccgtctactgcaacgctatcgcccagggcggggaggaggagtgggacttcgcctgggagcagttccgaaatgccacactggtcaatgaggctgacaagctccgggcagccctggcctgcagcaaagagttgtggatcctgaacaggtacctgagctacaccctgaacccggacttaatccggaagcaggacgccacctctaccatcatcagcattaccaacaacgtcattgggcaaggtctggtctgggactttgtccagagcaactggaagaagctttttaacgattatggtggtggctcgttctccttctccaacctcatccaggcagtgacacgacgattctccaccgagtatgagctgcagcagctggagcagttcaagaaggacaacgaggaaacaggcttcggctcaggcacccgggccctggagcaagccctggagaagacgaaagccaacatcaagtgggtgaaggagaacaaggaggtggtgctccagtggttcacagaaaacagcaaatagtccccagcccttgaagtcacccggccccgatgcaaggtgcccacatgtgtccatcccagcggctggtgcagggcctccattcctggagcccgaggcaccagtgtcctcccctcaaggacaaagtctccagcccacgttctctctgcctgtgagccagtctagttcctgatgacccaggctgcctgagcacctcccagcccctgcccctcatgccaaccccgccctaggcctggcatggcacctgtcgcccagtgccctggggctgatctcagggaagcccagctccagggccagatgagcagaagctctcgatggacaatgaacggccttgctgggggccgccctgtaccctctttcacctttccctaaagaccctaaatctgaggaatcaacagggcagcagatctgtatatttttttctaagagaaaatgtaaataaaggatttctagatgaaaaaaaaaaaaaaaaa

SEQ ID NO: 32 - protein, 967 aa, Homo sapiens
MAKGFYISKSLGILGILLGVAAVCTIIALSVVYSQEKNKNANSSPVASTTPSASATTNPASATTLDQSKAWNRYRLPNTLKPDSYQVTLRPYLTPNDRGLYVFKGSSTVRFTCKEATDVIIIHSKKLNYTLSQGHRVVLRGVGGSQPPDIDKTELVEPTEYLVVHLKGSLVKDSQYEMDSEFEGELADDLAGFYRSEYMEGNVRKVVATTQMQAADARKSFPCFDEPAMKAEFNITLIHPKDLTALSNMLPKGPSTPLPEDPNWNVTEFHTTPKMSTYLLAFIVSEFDYVEKQASNGVLIRIWARPSAIAAGHGDYALNVTGPILNFFAGHYDTPYPLPKSDQIGLPDFNAGAMENWGLVTYRENSLLFDPLSSSSSNKERVVTVIAHELAHQWFGNLVTIEWWNDLWLNEGFASYVEYLGADYAEPTWNLKDLMVLNDVYRVMAVDALASSHPLSTPASEINTPAQISELFDAISYSKGASVLRMLSSFLSEDVFKQGLASYLHTFAYQNTIYLNLWDHLQEAVNNRSIQLPTTVRDIMNRWTLQMGFPVITVDTSTGTLSQEHFLLDPDSNVTRPSEFNYVWIVPITSIRDGRQQQDYWLIDVRAQNDLFSTSGNEWVLLNLNVTGYYRVNYDEENWRKIQTQLQRDHSAIPVINRAQIINDAFNLASAHKVPVTLALNNTLFLIEERQYMPWEAALSSLSYFKLMFDRSEVYGPMKNYLKKQVTPLFIHFRNNTNNWREIPENLMDQYSEVNAISTACSNGVPECEEMVSGLFKQWMENPNNNPIHPNLRSTVYCNAIAQGGEEEWDFAWEQFRNATLVNEADKLRAALACSKELWILNRYLSYTLNPDLIRKQDATSTIISITNNVIGQGLVWDFVQSNWKKLFNDYGGGSFSFSNLIQAVTRRFSTEYELQQLEQFKKDNEETGFGSGTRALEQALEKTKANIKWVKENKEVVLQWFTENSK

SEQ ID NO: 33 - DNA, 1339 bp, Homo sapiens
gaattccgattagtgtgatctcagctcaaggcaaaggtgggatatcatggcatctatctgggttggacaccgaggaacagtaagagattatccagactttagcccatcagtggatgctgaagctattcagaaagcaatcagaggaattggaactgatgagaaaatgctcatcagcattctgactgagaggtcaaatgcacagcggcagctgattgttaaggaatatcaagcagcatatggaaaggagctgaaagatgacttgaagggtgatctctctggccactttgagcatctcatggtggccctagtgactccaccagcagtctttgatgcaaagcagctaaagaaatccatgaagggcgcgggaacaaacgaagatgccttgattgaaatcttaactaccaggacaagcaggcaaatgaaggatatctctcaagcctattatacagtatacaagaagagtcttggagatgacattagttccgaaacatctggtgacttccggaaagctctgttgactttggcagatggcagaagagatgaaagtctgaaagtggatgagcatctggccaaacaagatgcccagattctctataaagctggtgagaacagatggggcacggatgaagacaaattcactgagatcctgtgtttaaggagctttcctcaattaaaactaacatttgatgaatacagaaatatcagccaaaaggacattgtggacagcataaaaggagaattatctgggcattttgaagacttactgttggccatagttaattgtgtgaggaacacgccggcctttttagccgaaagactgcatcgagccttgaagggtattggaactgatgagtttactctgaaccgaataatggtgtccagatcagaaattgaccttttggacattcgaacagagttcaagaagcattatggctattccctatattcagcaattaaatcggatacttctggagactatgaaatcacactcttaaaaatctgtggtggagatgactgaaccaagaagataatctccaaaggtccacgatgggctttcccaacagctccaccttacttcttctcatactatttaagagaacaagcaaatataaacagcaacttgtgttcctaacaggaattttcattgttctataacaacaacaacaaaagcgattattattttagagcatctcatttataatgtagcagctcataaatgaaattgaaaatggtattaaagatctgcaactactatccaacttatatttctgctttcaaagttaagaatctttatagttctactccattaaatataaagcaagataataaaacggaattc

SEQ ID NO: 34 - protein, 323 aa, Homo sapiens
MASIWVGHRGTVRDYPDFSPSVDAEAIQKAIRGIGTDEKMLISILTERSNAQRQLIVKEYQAAYGKELKDDLKGDLSGHFEHLMVALVTPPAVFDAKQLKKSMKGAGTNEDALIEILTTRTSRQMKDISQAYYTVYKKSLGDDISSETSGDFRKALLTLADGRRDESLKVDEHLAKQDAQILYKAGENRWGTDEDKFTEILCLRSFPQLKLTFDEYRNISQKDIVDSIKGELSGHFEDLLLAIVNCVRNTPAFLAERLHRALKGIGTDEFTLNRIMVSRSEIDLLDIRTEFKKHYGYSLYSAIKSDTSGDYEITLLKICGGDD

SEQ ID NO: 35 - DNA, 4321 bp, Homo sapiens
cgagatcccggggagccagcttgctgggagagcgggacggtccggagcaagcccacaggcagaggaggcgacagagggaaaaagggccgagctagccgctccagtgctgtacaggagccgaagggacgcaccacgccagccccagcccggctccagcgacagccaacgcctcttgcagcgcggcggcttcgaagccgccgcccggagctgccctttcctcttcggtgaagtttttaaaagctgctaaagactcggaggaagcaaggaaagtgcctggtaggactgacggctgcctttgtcctcctcctctccaccccgcctccccccaccctgccttccccccctcccccgtcttctctcccgcagctgcctcagtcggctactctcagccaacccccctcaccacccttctccccacccgcccccccgcccccgtcggcccagcgctgccagcccgagtttgcagagaggtaactccctttggctgcgagcgggcgagctagctgcacattgcaaagaaggctcttaggagccaggcgactggggagcggcttcagcactgcagccacgacccgcctggttagaattccggcggagagaaccctctgttttcccccactctctctccacctcctcctgccttccccaccccgagtgcggagcagagatcaaaagatgaaaaggcagtcaggtcttcagtagccaaaaaacaaaacaaacaaaaacaaaaaagccgaaataaaagaaaaagataataactcagttcttatttgcacctacttcagtggacactgaatttggaaggtggaggattttgtttttttcttttaagatctgggcatcttttgaatctacccttcaagtattaagagacagactgtgagcctagcagggcagatcttgtccaccgtgtgtcttcttctgcacgagactttgaggctgtcagagcgctttttgcgtggttgctcccgcaagtttccttctctggagcttcccgcaggtgggcagctagctgcagcgactaccgcatcatcacagcctgttgaactcttctgagcaagagaaggggaggcggggtaagggaagtaggtggaagattcagccaagctcaaggatggaagtgcagttagggctgggaagggtctaccctcggccgccgtccaagacctaccgaggagctttccagaatctgttccagagcgtgcgcgaagtgatccagaacccgggccccaggcacccagaggccgcgagcgcagcacctcccggcgccagtttgctgctgctgcagcagcagcagcagcagcagcagcagcagcagcagcagcagcagcagcagcagcagcagcaagagactagccccaggcagcagcagcagcagcagggtgaggatggttctccccaagcccatcgtagaggccccacaggctacctggtcctggatgaggaacagcaaccttcacagccgcagtcggccctggagtgccaccccgagagaggttgcgtcccagagcctggagccgccgtggccgccagcaaggggctgccgcagcagctgccagcacctccggacgaggatgactcagctgccccatccacgttgtccctgctgggccccactttccccggcttaagcagctgctccgctgaccttaaagacatcctgagcgaggccagcaccatgcaactccttcagcaacagcagcaggaagcagtatccgaaggcagcagcagcgggagagcgagggaggcctcgggggctcccacttcctccaaggacaattacttagggggcacttcgaccatttctgacaacgccaaggagttgtgtaaggcagtgtcggtgtccatgggcctgggtgtggaggcgttggagcatctgagtccaggggaacagcttcggggggattgcatgtacgccccacttttgggagttccacccgctgtgcgtcccactccttgtgccccattggccgaatgcaaaggttctctgctagacgacagcgcaggcaagagcactgaagatactgctgagtattcccctttcaagggaggttacaccaaagggctagaaggcgagagcctaggctgctctggcagcgctgcagcagggagctccgggacacttgaactgccgtctaccctgtctctctacaagtccggagcactggacgaggcagctgcgtaccagagtcgcgactactacaactttccactggctctggccggaccgccgccccctccgccgcctccccatccccacgctcgcatcaagctggagaacccgctggactacggcagcgcctgggcggctgcggcggcgcagtgccgctatggggacctggcgagcctgcatggcgcgggtgcagcgggacccggttctgggtcaccctcagccgccgcttcctcatcctggcacactctcttcacagccgaagaaggccagttgtatggaccgtgtggtggtggtgggggtggtggcggcggcggcggcggcggcggcggcggcggcggcggcggcggcggcggcggcgaggcgggagctgtagccccctacggctacactcggccccctcaggggctggcgggccaggaaagcgacttcaccgcacctgatgtgtggtaccctggcggcatggtgagcagagtgccctatcccagtcccacttgtgtcaaaagcgaaatgggcccctggatggatagctactccggaccttacggggacatgcgtttggagactgccagggaccatgttttgcccattgactattactttccaccccagaagacctgcctgatctgtggagatgaagcttctgggtgtcactatggagctctcacatgtggaagctgcaaggtcttcttcaaaagagccgctgaagggaaacagaagtacctgtgcgccagcagaaatgattgcactattgataaattccgaaggaaaaattgtccatcttgtcgtcttcggaaatgttatgaagcagggatgactctgggagcccggaagctgaagaaacttggtaatctgaaactacaggaggaaggagaggcttccagcaccaccagccccactgaggagacaacccagaagctgacagtgtcacacattgaaggctatgaatgtcagcccatctttctgaatgtcctggaagccattgagccaggtgtagtgtgtgctggacacgacaacaaccagcccgactcctttgcagccttgctctctagcctcaatgaactgggagagagacagcttgtacacgtggtcaagtgggccaaggccttgcctggcttccgcaacttacacgtggacgaccagatggctgtcattcagtactcctggatggggctcatggtgtttgccatgggctggcgatccttcaccaatgtcaactccaggatgctctacttcgcccctgatctggttttcaatgagtaccgcatgcacaagtcccggatgtacagccagtgtgtccgaatgaggcacctctctcaagagtttggatggctccaaatcaccccccaggaattcctgtgcatgaaagcactgctactcttcagcattattccagtggatgggctgaaaaatcaaaaattctttgatgaacttcgaatgaactacatcaaggaactcgatcgtatcattgcatgcaaaagaaaaaatcccacatcctgctcaagacgcttctaccagctcaccaagctcctggactccgtgcagcctattgcgagagagctgcatcagttcacttttgacctgctaatcaagtcacacatggtgagcgtggactttccggaaatgatggcagagatcatctctgtgcaagtgcccaagatcctttctgggaaagtcaagcccatctatttccacacccagtgaagcattggaaaccctatttccccaccccagctcatgccccctttcagatgtcttctgcctgttataactctgcactactcctctgcagtgccttggggaatttcctctattgatgtacagtctgtcatgaacatgttcctgaattctatttgctgggctttttttttctctttctctcctttctttttcttcttccctccctatctaaccctcccatggcaccttcagactttgcttcccattgtggctcctatctgtgttttgaatggtgttgtatgcctttaaatctgtgatgatcctcatatggcccagtgtcaagttgtgcttgtttacagcactactctgtgccagccacacaaacgtttacttatcttatgccacgggaagtttagagagctaagattatctggggaaatcaaaacaaaaaacaagcaaacaaaaaaaaaa

SEQ ID NO: 36 - protein, 919 aa, Homo sapiens
MEVQLGLGRVYPRPPSKTYRGAFQNLFQSVREVIQNPGPRHPEAASAAPPGASLLLLQQQQQQQQQQQQQQQQQQQQQETSPRQQQQQQGEDGSPQAHRRGPTGYLVLDEEQQPSQPQSALECHPERGCVPEPGAAVAASKGLPQQLPAPPDEDDSAAPSTLSLLGPTFPGLSSCSADLKDILSEASTMQLLQQQQQEAVSEGSSSGRAREASGAPTSSKDNYLGGTSTISDNAKELCKAVSVSMGLGVEALEHLSPGEQLRGDCMYAPLLGVPPAVRPTPCAPLAECKGSLLDDSAGKSTEDTAEYSPFKGGYTKGLEGESLGCSGSAAAGSSGTLELPSTLSLYKSGALDEAAAYQSRDYYNFPLALAGPPPPPPPPHPHARIKLENPLDYGSAWAAAAAQCRYGDLASLHGAGAAGPGSGSPSAAASSSWHTLFTAEEGQLYGPCGGGGGGGGGGGGGGGGGGGGGGGGEAGAVAPYGYTRPPQGLAGQESDFTAPDVWYPGGMVSRVPYPSPTCVKSEMGPWMDSYSGPYGDMRLETARDHVLPIDYYFPPQKTCLICGDEASGCHYGALTCGSCKVFFKRAAEGKQKYLCASRNDCTIDKFRRKNCPSCRLRKCYEAGMTLGARKLKKLGNLKLQEEGEASSTTSPTEETTQKLTVSHIEGYECQPIFLNVLEAIEPGVVCAGHDNNQPDSFAALLSSLNELGERQLVHVVKWAKALPGFRNLHVDDQMAVIQYSWMGLMVFAMGWRSFTNVNSRMLYFAPDLVFNEYRMHKSRMYSQCVRMRHLSQEFGWLQITPQEFLCMKALLLFSIIPVDGLKNQKFFDELRMNYIKELDRIIACKRKNPTSCSRRFYQLTKLLDSVQPIARELHQFTFDLLIKSHMVSVDFPEMMAEIISVQVPKILSGKVKPIYFHTQ

SEQ ID NO: 37 - DNA, 1070 bp, Homo sapiens
gccttcgaggtgccttaggccgcttgccttgctctcagaatcgctgccgccatggctagtcagtctcaggggattcagcagctgctgcaggccgagaagcgggcagccgagaaggtgtccgaggcccgcaaaagaaagaaccggaggctgaagcaggccaaagaagaagctcaggctgaaattgaacagtaccgcctgcagagggagaaagaattcaaggccaaggaagctgcggcattgggatcccgtggcagttgcagcactgaagtggagaaggagacccaggagaagatgaccatcctccagacatacttccggcagaacagggatgaagtcttggacaacctcttggcttttgtctgtgacattcggccagaaatccatgaaaactaccgcataaatggatagaagagagaagcacctgtgctgtggagtggcattttagatgccctcacgaatatgaagcttagcacagctctagttacattcttatgatatggcattaaattatttccatatattatataataggtccttccactttttggagagtagcaaatctagcttttttgtacagacttagaaattatctaaagatttcatctttttacctcatatttcttaggaatttaatggttatatgttgtctttttttcctatgtcttttggctcaagcaacatgtatatcagtgttgactttttctttcttagatctagtttaaaaaaaaaaaaaaccacataacaattctttgaagaaaggaagggattaaataatttttttccctaacactttcttgaaggtcaggggctttatctatgaaaaagtagtaaatagttctttgtaacctgtgtgaagcagcagccagccttaaagtagtccattcttgctaatggttagaacagtgaatactagtggaattgtttgggctgcttttagtttctcttaatcaaaattactagatgatagaattcaagaacttgttacatgtattacttggtgtatcgataatcatttaaaagtaaagactctgtcatgcagtaaaaaaaaaaaaaaaaaaaaaaaaaaaaaa

SEQ ID NO: 38 - protein, 118 aa, Homo sapiens
MASQSQGIQQLLQAEKRAAEKVSEARKRKNRRLKQAKEEAQAEIEQYRLQREKEFKAKEAAALGSRGSCSTEVEKETQEKMTILQTYFRQNRDEVLDNLLAFVCDIRPEIHENYRING

SEQ ID NO: 39 - DNA, 1388 bp, Homo sapiens
gtttattttctgcttaaggatcgccatcgccatcattgcttgtcgttgacttcggatttgttttcggactccttggaggcatctgcaggctaaaaggagacaacgggaggagcccgtcctggcactcccattggcctgtagattcacctgccctgggcagggccccaggacccaggataatatctggtgcctcctgcccagaaccctcaagcagacacaatggtaagaatggtgcctgtcctgctgtctctgctgctgcttctgggtcctgctgtcccccaggagaaccaagatggtcgttactctctgacctatatctacactgggctgtccaagcatgttgaagacgtccccgcgtttcaggcccttggctcactcaatgacctccagttctttagatacaacagtaaagacaggaagtctcagcccatgggactctggagacaggtggaaggaatggaggattggaagcaggacagccaacttcagaaggccagggaggacatctttatggagaccctgaaagacattgtggagtattacaacgacagtaacgggtctcacgtattgcagggaaggtttggttgtgagatcgagaataacagaagcagcggagcattctggaaatattactatgatggaaaggactacattgaattcaacaaagaaatcccagcctgggtccccttcgacccagcagcccagataaccaagcagaagtgggaggcagaaccagtctacgtgcagcgggccaaggcttacctggaggaggagtgccctgcgactctgcggaaatacctgaaatacagcaaaaatatcctggaccggcaagatcctccctctgtggtggtcaccagccaccaggccccaggagaaaagaagaaactgaagtgcctggcctacgacttctacccagggaaaattgatgtgcactggactcgggccggcgaggtgcaggagcctgagttacggggagatgttcttcacaatggaaatggcacttaccagtcctgggtggtggtggcagtgcccccgcaggacacagccccctactcctgccacgtgcagcacagcagcctggcccagcccctcgtggtgccctgggaggccagctaggaagcaagggttggaggcaatgtgggatctcagacccagtagctgcccttcctgcctgatgtgggagctgaaccacagaaatcacagtcaatggatccacaaggcctgaggagcagtgtggggggacagacaggaggtggatttggagaccgaagactgggatgcctgtcttgagtagacttggacccaaaaaatcatctcaccttgagcccacccccaccccattgtctaatctgtagaagctaataaataatcatccctccttgcctagc

SEQ ID NO: 40 - protein, 298 aa, Homo sapiens
MVRMVPVLLSLLLLLGPAVPQENQDGRYSLTYIYTGLSKHVEDVPAFQALGSLNDLQFFRYNSKDRKSQPMGLWRQVEGMEDWKQDSQLQKAREDIFMETLKDIVEYYNDSNGSHVLQGRFGCEIENNRSSGAFWKYYYDGKDYIEFNKEIPAWVPFDPAAQITKQKWEAEPVYVQRAKAYLEEECPATLRKYLKYSKNILDRQDPPSVVVTSHQAPGEKKKLKCLAYDFYPGKIDVHWTRAGEVQEPELRGDVLHNGNGTYQSWVVVAVPPQDTAPYSCHVQHSSLAQPLVVPWEAS

SEQ ID NO: 41 - DNA, 897 bp, Homo sapiens
atggtaagaatggtgcctgtcctgctgtctctgctgctgcttctgggtcctgctgtcccccaggagaaccaagatggtcgttactctctgacctatatctacactgggctgtccaagcatgttgaagacgtccccgcgtttcaggcccttggctcactcaatgacctccagttctttagatacaacagtaaagacaggaagtctcagcccatgggactctggagacaggtggaaggaatggaggattggaagcaggacagccaacttcagaaggccagggaggacatctttatggagaccctgaaagacattgtggagtattacaacgacagtaacgggtctcacgtattgcagggaaggtttggttgtgagatcgagaataacagaagcagcggagcattctggaaatattactatgatggaaaggactacattgaattcaacaaagaaatcccagcctgggtccccttcgacccagcagcccagataaccaagcagaagtgggaggcagaaccagtctacgtgcagcgggccaaggcttacctggaggaggagtgccctgcgactctgcggaaatacctgaaatacagcaaaaatatcctggaccggcaagatcctccctctgtggtggtcaccagccaccaggccccaggagaaaagaagaaactgaagtgcctggcctacgacttctacccagggaaaattgatgtgcactggactcgggccggcgaggtgcaggagcctgagttacggggagatgttcttcacaatggaaatggcacttaccagtcctgggtggtggtggcagtgcccccgcaggacacagccccctactcctgccacgtgcagcacagcagcctggcccagcccctcgtggtgccctgggaggccagctag

SEQ ID NO: 42 - protein, 298 aa, Homo sapiens; identical to SEQ ID NO: 40

SEQ ID NO: 43 - DNA, 963 bp, Homo sapiens
cggccggcgatatggctgccgctgtgccccgcgccgcatttctctccccgctgcttccccttctcctgggcttcctgctcctctccgctccgcatggcggcagcggcctgcacaccaagggcgcccttcccctggatacggtcactttctacaaggtcattcccaaaagcaagttcgtcttggtgaagttcgacacccagtacccctacggtgagaagcaggatgagttcaagcgtcttgctgaaaactcggcttccagcgatgatctcttggtggcagaggtggggatctcagattatggtgacaagctgaacatggagctgagtgagaaatacaagctggacaaagagagctacccagtcttctacctcttccgggatggggactttgagaacccagtcccatacactggggcagttaaggttggagccatccagcgctggctgaaggggcaaggggtctacctaggtatgcctggttgcctgcctgtatacgacgccctggccggggagttcatcagggcctctggtgtggaggcccgccaggccctcttgaagcaggggcaagataacctctcaagtgtgaaggagactcagaagaagtgggccgagcaatacctgaagatcatggggaagatcttagaccaaggggaggacttcccagcatcagagatgacacggatcgccaggctgattgagaagaacaagatgagtgacggcaagaaggaggagctccagaagagcttaaacatcctgactgccttccagaagaagggggccgagaaagaggagctgtaaaaaggctgtctgtgattttccagggtttggtgggggtagggaggggagagttaacctgctggctgtgagtcccttgtggaatataagggggtagtgggaacagtggtactaacccacgattctgagccctgagtatgcctggacattgatgctaacatgacatgct

SEQ ID NO: 44 - protein, 261 aa, Homo sapiens
MAAAVPRAAFLSPLLPLLLGFLLLSAPHGGSGLHTKGALPLDTVTFYKVIPKSKFVLVKFDTQYPYGEKQDEFKRLAENSASSDDLLVAEVGISDYGDKLNMELSEKYKLDKESYPVFYLFRDGDFENPVPYTGAVKVGAIQRWLKGQGVYLGMPGCLPVYDALAGEFIRASGVEARQALLKQGQDNLSSVKETQKKWAEQYLKIMGKILDQGEDFPASEMTRIARLIEKNKMSDGKKEELQKSLNILTAFQKKGAEKEEL

SEQ ID NO: 45 - DNA, 627 bp, Homo sapiens
gacctttccgagttggctgcagatttgtggtgcgttctgagccgtctgtcctgcgccaagatgcttcaaagtattattaaaaacatatggatccccatgaagccctactacaccaaagtttaccaggagatttggataggaatggggctgatgggcttcatcgtttataaaatccgggctgctgataaaagaagtaaggctttgaaagcttcagcgcctgctcctggtcatcactaaccagatttacttggagtacatgtgaaagaaaacgtcagtctgcctgtaaatttcagcaagccgtgttagatggggagcgtggacagtcactgtacacttgtataagtaccgtttacttcatggcatgaataaatggatctgtgagatgcactgctacctggtactgctttcagtgtgttccccctcagcccctccggcgtgtcaggcatactctgagtagataatttgtcatgcagcgcatgcaatcagaatctcactgagccacccatcattgtgaaataattacctcagttgtacaggacttggtgatcaggatccaggcactcacttgtattctactgctcaataaacgtttattaaacttgatcctgctactaaaaaaaaaaaaaa

SEQ ID NO: 46 - protein, 58 aa, Homo sapiens
MLQSIIKNIWIPMKPYYTKVYQEIWIGMGLMGFIVYKIRAADKRSKALKASAPAPGHH

SEQ ID NO: 47 - DNA, 1104 bp, Homo sapiens
ctcggtgcgcgaccccggctcagaggactctttgctgtcccgcaagatgcggatgctgctggcgctcctggccctctccgcggcgcggccatcggccagtgcagagtcacactggtgctacgaggttcaagccgagtcctccaactacccctgcttggtgccagtcaagtggggtggaaactgccagaaggaccgccagtcccccatcaacatcgtcaccaccaaggcaaaggtggacaaaaaactgggacgcttcttcttctctggctacgataagaagcaaacgtggactgtccaaaataacgggcactcagtgatgatgttgctggagaacaaggccagcatttctggaggaggactgcctgccccataccaggccaaacagttgcacctgcactggtccgacttgccatataagggctcggagcacagcctcgatggggagcactttgccatggagatgcacatagtacatgagaaagagaaggggacatcgaggaatgtgaaagaggcccaggaccctgaagacgaaattgcggtgctggcctttctggtggaggctggaacccaggtgaacgagggcttccagccactggtggaggcactgtctaatatccccaaacctgagatgagcactacgatggcagagagcagcctgttggacctgctccccaaggaggagaaactgaggcactacttccgctacctgggctcactcaccacaccgacctgcgatgagaaggtcgtctggactgtgttccgggagcccattcagcttcacagagaacagatcctggcattctctcagaagctgtactacgacaaggaacagacagtgagcatgaaggacaatgtcaggcccctgcagcagctggggcagcgcacggtgataaagtccggggccccgggtcggccgctgccctgggccctgcctgccctgctgggccccatgctggcctgcctgctggccggcttcctgcgatgatggctcacttctgcacgcagcctctctgttgcctcagctctccaagttccaggcttccggtccttagccttcccaggtgggactttaggcatgattaaaatatggacatatttttggag

SEQ ID NO: 48 - protein, 312 aa, Homo sapiens
MRMLLALLALSAARPSASAESHWCYEVQAESSNYPCLVPVKWGGNCQKDRQSPINIVTTKAKVDKKLGRFFFSGYDKKQTWTVQNNGHSVMMLLENKASISGGGLPAPYQAKQLHLHWSDLPYKGSEHSLDGEHFAMEMHIVHEKEKGTSRNVKEAQDPEDEIAVLAFLVEAGTQVNEGFQPLVEALSNIPKPEMSTTMAESSLLDLLPKEEKLRHYFRYLGSLTTPTCDEKVVWTVFREPIQLHREQILAFSQKLYYDKEQTVSMKDNVRPLQQLGQRTVIKSGAPGRPLPWALPALLGPMLACLLAGFLR

SEQ ID NO: 49 - DNA, 7193 bp, Homo sapiens
agaataagggcagggaccgcggctcctatctcttggtgatccccttccccattccgcccccgcctcaacgcccagcacagtgccctgcacacagtagtcgctcaataaatgttcgtggatgatgatgatgatgatgatgaaaaaaatgcagcatcaacggcagcagcaagcggaccacgcgaacgaggcaaactatgcaagaggcaccagacttcctctttctggtgaaggaccaacttctcagccgaatagctccaagcaaactgtcctgtcttggcaagctgcaatcgatgctgctagacaggccaaggctgcccaaactatgagcacctctgcacccccacctgtaggatctctctcccaaagaaaacgtcagcaatacgccaagagcaaaaaacagggtaactcgtccaacagccgacctgcccgcgcccttttctgtttatcactcaataaccccatccgaagagcctgcattagtatagtggaatggaaaccatttgacatatttatattattggctatttttgccaattgtgtggccttagctatttacatcccattccctgaagatgattctaattcaacaaatcataacttggaaaaagtagaatatgccttcctgattatttttacagtcgagacatttttgaagattatagcgtatggattattgctacatcctaatgcttatgttaggaatggatggaatttactggattttgttatagtaatagtaggattgtttagtgtaattttggaacaattaaccaaagaaacagaaggcgggaaccactcaagcggcaaatctggaggctttgatgtcaaagccctccgtgcctttcgagtgttgcgaccacttcgactagtgtcaggggtgcccagtttacaagttgtcctgaactccattataaaagccatggttcccctccttcacatagcccttttggtattatttgtaatcataatctatgctattataggattggaactttttattggaaaaatgcacaaaacatgtttttttgctgactcagatatcgtagctgaagaggacccagctccatgtgcgttctcagggaatggacgccagtgtactgccaatggcacggaatgtaggagtggctgggttggcccgaacggaggcatcaccaactttgataactttgcctttgccatgcttactgtgtttcagtgcatcaccatggagggctggacagacgtgctctactgggtaaatgatgcgataggatgggaatggccatgggtgtattttgttagtctgatcatccttggctcatttttcgtccttaacctggttcttggtgtccttagtggagaattctcaaaggaaagagagaaggcaaaagcacggggagatttccagaagctccgggagaagcagcagctggaggaggatctaaagggctacttggattggatcacccaagctgaggacatcgatccggagaatgaggaagaaggaggagaggaaggcaaacgaaatactagcatgcccaccagcgagactgagtctgtgaacacagagaacgtcagcggtgaaggcgagaaccgaggctgctgtggaagtctctggtgctggtggagacggagaggcgcggccaaggcggggccctctgggtgtcggcggtggggtcaagccatctcaaaatccaaactcagccgacgctggcgtcgctggaaccgattcaatcgcagaagatgtagggccgccgtgaagtctgtcacgttttactggctggttatcgtcctggtgtttctgaacaccttaaccatttcctctgagcactacaatcagccagattggttgacacagattcaagatattgccaacaaagtcctcttggctctgttcacctgcgagatgctggtaaaaatgtacagcttgggcctccaagcatatttcgtctctcttttcaaccggtttgattgcttcgtggtgtgtggtggaatcactgagacgatcctggtggaactggaaatcatgtctcccctggggatctctgtgtttcggtgtgtgcgcctcttaagaatcttcaaagtgaccaggcactggacttccctgagcaacttagtggcatccttattaaactccatgaagtccatcgcttcgctgttgcttctgctttttctcttcattatcatcttttccttgcttgggatgcagctgtttggcggcaagtttaattttgatgaaacgcaaaccaagcggagcacctttgacaatttccctcaagcacttctcacagtgttccagatcctgacaggcgaagactggaatgctgtgatgtacgatggcatcatggcttacgggggcccatcctcttcaggaatgatcgtctgcatctacttcatcatcctcttcatttgtggtaactatattctactgaatgtcttcttggccatcgctgtagacaatttggctgatgctgaaagtctgaacactgctcagaaagaagaagcggaagaaaaggagaggaaaaagattgccagaaaagagagcctagaaaataaaaagaacaacaaaccagaagtcaaccagatagccaacagtgacaacaaggttacaattgatgactatagagaagaggatgaagacaaggacccctatccgccttgcgatgtgccagtaggggaagaggaagaggaagaggaggaggatgaacctgaggttcctgccggaccccgtcctcgaaggatctcggagttgaacatgaaggaaaaaattgcccccatccctgaagggagcgctttcttcattcttagcaagaccaacccgatccgcgtaggctgccacaagctcatcaaccaccacatcttcaccaacctcatccttgtcttcatcatgctgagcagcgctgccctggccgcagaggaccccatccgcagccactccttccggaacacgatactgggttactttgactatgccttcacagccatctttactgttgagatcctgttgaagatgacaacttttggagctttcctccacaaaggggccttctgcaggaactacttcaatttgctggatatgctggtggttggggtgtctctggtgtcatttgggattcaatccagtgccatctccgttgtgaagattctgagggtcttaagggtcctgcgtcccctcagggccatcaacagagcaaaaggacttaagcacgtggtccagtgcgtcttcgtggccatccggaccatcggcaacatcatgatcgtcactaccctcctgcagttcatgtttgcctgtatcggggtccagttgttcaaggggaagttctatcgctgtacggatgaagccaaaagtaaccctgaagaatgcaggggacttttcatcctctacaaggatggggatgttgacagtcctgtggtccgtgaacggatctggcaaaacagtgatttcaacttcgacaacgtcctctctgctatgatggcgctcttcacagtctccacgtttgagggctggcctgcgttgctgtataaagccatcgactcgaatggagagaacatcggcccaatctacaaccaccgcgtggagatctccatcttcttcatcatctacatcatcattgtagctttcttcatgatgaacatctttgtgggctttgtcatcgttacatttcaggaacaaggagaaaaagagtataagaactgtgagctggacaaaaatcagcgtcagtgtgttgaatacgccttgaaagcacgtcccttgcggagatacatccccaaaaacccctaccagtacaagttctggtacgtggtgaactcttcgcctttcgaatacatgatgtttgtcctcatcatgctcaacacactctgcttggccatgcagcactacgagcagtccaagatgttcaatgatgccatggacattctgaacatggtcttcaccggggtgttcaccgtcgagatggttttgaaagtcatcgcatttaagcctaaggggtattttagtgacgcctggaacacgtttgactccctcatcgtaatcggcagcattatagacgtggccctcagcgaagcggacccaactgaaagtgaaaatgtccctgtcccaactgctacacctgggaactctgaagagagcaatagaatctccatcacctttttccgtcttttccgagtgatgcgattggtgaagcttctcagcaggggggaaggcatccggacattgctgtggacttttattaagtcctttcaggcgctcccgtatgtggccctcctcatagccatgctgttcttcatctatgcggtcattggcatgcagatgtttgggaaagttgccatgagagataacaaccagatcaataggaacaataacttccagacgtttccccaggcggtgctgctgctcttcaggtgtgcaacaggtgaggcctggcaggagatcatgctggcctgtctcccagggaagctctgtgaccctgagtcagattacaaccccggggaggagtatacatgtgggagcaactttgccattgtctatttcatcagtttttacatgctctgtgcatttctgatcatcaatctgtttgtggctgtcatcatggataatttcgactatctgacccgggactggtctattttggggcctcaccatttagatgaattcaaaagaatatggtcagaatatgaccctgaggcaaagggaaggataaaacaccttgatgtggtcactctgcttcgacgcatccagcctcccctggggtttgggaagttatgtccacacagggtagcgtgcaagagattagttgccatgaacatgcctctcaacagtgacgggacagtcatgtttaatgcaaccctgtttgctttggttcgaacggctcttaagatcaagaccgaagggaacctggagcaagctaatgaagaacttcgggctgtgataaagaaaatttggaagaaaaccagcatgaaattacttgaccaagttgtccctccagctggtgatgatgaggtaaccgtggggaagttctatgccactttcctgatacaggactactttaggaaattcaagaaacggaaagaacaaggactggtgggaaagtaccctgcgaagaacaccacaattgccctacaggcgggattaaggacactgcatgacattgggccagaaatccggcgtgctatatcgtgtgatttgcaagatgacgagcctgaggaaacaaaacgagaagaagaagatgatgtgttcaaaagaaatggtgccctgcttggaaaccatgtcaatcatgttaatagtgataggagagattcccttcagcagaccaataccacccaccgtcccctgcatgtccaaaggccttcaattccacctgcaagtgatactgagaaaccgctgtttcctccagcaggaaattcggtgtgtcataaccatcataaccataattccataggaaagcaagttcccacctcaacaaatgccaatctcaataatgccaatatgtccaaagctgcccatggaaagcggcccagcattgggaaccttgagcatgtgtctgaaaatgggcatcattcttcccacaagcatgaccgggagcctcagagaaggtccagtgtgaaaagaacccgctattatgaaacttacattaggtccgactcaggagatgaacagctcccaactatttgccgggaagacccagagatacatggctatttcagggacccccactgcttgggggagcaggagtatttcagtagtgaggaatgctacgaggatgacagctcgcccacctggagcaggcaaaactatggctactacagcagatacccaggcagaaacatcgactctgagaggccccgaggctaccatcatccccaaggattcttggaggacgatgactcgcccgtttgctatgattcacggagatctccaaggagacgcctactacctcccaccccagcatcccaccggagatcctccttcaactttgagtgcctgcgccggcagagcagccaggaagaggtcccgtcgtctcccatcttcccccatcgcacggccctgcctctgcatctaatgcagcaacagatcatggcagttgccggcctagattcaagtaaagcccagaagtactcaccgagtcactcgacccggtcgtgggccacccctccagcaacccctccctaccgggactggacaccgtgctacacccccctgatccaagtggagcagtcagaggccctggaccaggtgaacggcagcctgccgtccctgcaccgcagctcctggtacacagacgagcccgacatctcctaccggactttcacaccagccagcctgactgtccccagcagcttccggaacaaaaacagcgacaagcagaggagtgcggacagcttggtggaggcagtcctgatatccgaaggcttgggacgctatgcaagggacccaaaatttgtgtcagcaacaaaacacgaaatcgctgatgcctgtgacctcaccatcgacgagatggagagtgcagccagcaccctgcttaatgggaacgtgcgtccccgagccaacggggatgtgggccccctctcacaccggcaggactatgagctacaggactttggtcctggctacagcgacgaagagccagaccctgggagggatgaggaggacctggcggatgaaatgatatgcatcaccaccttgtagcccccagcgaggggcagactggctctggcctcaggtggggcgcaggagagccaggggaaaagtgcctcatagttaggaaagtttaggcactagttgggagtaatattcaattaattagacttttgtataagagatgtcatgcctcaagaaagccataaacctggtaggaacaggtcccaagcggttgagcctggcagagtaccatgcgctcggccccagctgcaggaaacagcaggccccgccctctcacagaggatgggtgaggaggccagacctgccctgccccattgtccagatgggcactgctgtggagtctgcttctcccatgtaccagggcaccaggcccacccaactgaaggcatggcggcggggtgcaggggaaagttaaaggtgatgacgatcatcacacctcgtgtcgttacctcagccatcggtctagcatatcagtcactgggcccaacatatccatttttaaaccctttcccccaaatacactgcgtcctggttcctgtttagctgttctgaaata

SEQ ID NO: 50 - protein, 2181 aa, Homo sapiens
MMMMMMMKKMQHQRQQQADHANEANYARGTRLPLSGEGPTSQPNSSKQTVLSWQAAIDAARQAKAAQTMSTSAPPPVGSLSQRKRQQYAKSKKQGNSSNSRPARALFCLSLNNPIRRACISIVEWKPFDIFILLAIFANCVALAIYIPFPEDDSNSTNHNLEKVEYAFLIIFTVETFLKIIAYGLLLHPNAYVRNGWNLLDFVIVIVGLFSVILEQLTKETEGGNHSSGKSGGFDVKALRAFRVLRPLRLVSGVPSLQVVLNSIIKAMVPLLHIALLVLFVIIIYAIIGLELFIGKMHKTCFFADSDIVAEEDPAPCAFSGNGRQCTANGTECRSGWVGPNGGITNFDNFAFAMLTVFQCITMEGWTDVLYWVNDAIGWEWPWVYFVSLIILGSFFVLNLVLGVLSGEFSKEREKAKARGDFQKLREKQQLEEDLKGYLDWITQAEDIDPENEEEGGEEGKRNTSMPTSETESVNTENVSGEGENRGCCGSLWCWWRRRGAAKAGPSGCRRWGQAISKSKLSRRWRRWNRFNRRRCRAAVKSVTFYWLVIVLVFLNTLTISSEHYNQPDWLTQIQDIANKVLLALFTCEMLVKMYSLGLQAYFVSLFNRFDCFVVCGGITETILVELEIMSPLGISVFRCVRLLRIFKVTRHWTSLSNLVASLLNSMKSIASLLLLLFLFIIIFSLLGMQLFGGKFNFDETQTKRSTFDNFPQALLTVFQILTGEDWNAVMYDGIMAYGGPSSSGMIVCIYFIILFICGNYILLNVFLAIAVDNLADAESLNTAQKEEAEEKERKKIARKESLENKKNNKPEVNQIANSDNKVTIDDYREEDEDKDPYPPCDVPVGEEEEEEEEDEPEVPAGPRPRRISELNMKEKIAPIPEGSAFFILSKTNPIRVGCHKLINHHIFTNLILVFIMLSSAALAAEDPIRSHSFRNTILGYFDYAFTAIFTVEILLKMTTFGAFLHKGAFCRNYFNLLDMLVVGVSLVSFGIQSSAISVVKILRVLRVLRPLRAINRAKGLKHVVQCVFVAIRTIGNIMIVTTLLQFMFACIGVQLFKGKFYRCTDEAKSNPEECRGLFILYKDGDVDSPVVRERIWQNSDFNFDNVLSAMMALFTVSTFEGWPALLYKAIDSNGENIGPIYNHRVEISIFFIIYIIIVAFFMMNIFVGFVIVTFQEQGEKEYKNCELDKNQRQCVEYALKARPLRRYIPKNPYQYKFWYVVNSSPFEYMMFVLIMLNTLCLAMQHYEQSKMFNDAMDILNMVFTGVFTVEMVLKVIAFKPKGYFSDAWNTFDSLIVIGSIIDVALSEADPTESENVPVPTATPGNSEESNRISITFFRLFRVMRLVKLLSRGEGIRTLLWTFIKSFQALPYVALLIAMLFFIYAVIGMQMFGKVAMRDNNQINRNNNFQTFPQAVLLLFRCATGEAWQEIMLACLPGKLCDPESDYNPGEEYTCGSNFAIVYFISFYMLCAFLIINLFVAVIMDNFDYLTRDWSILGPHHLDEFKRIWSEYDPEAKGRIKHLDVVTLLRRIQPPLGFGKLCPHRVACKRLVAMNMPLNSDGTVMFNATLFALVRTALKIKTEGNLEQANEELRAVIKKIWKKTSMKLLDQVVPPAGDDEVTVGKFYATFLIQDYFRKFKKRKEQGLVGKYPAKNTTIALQAGLRTLHDIGPEIRRAISCDLQDDEPEETKREEEDDVFKRNGALLGNHVNHVNSDRRDSLQQTNTTHRPLHVQRPSIPPASDTEKPLFPPAGNSVCHNHHNHNSIGKQVPTSTNANLNNANMSKAAHGKRPSIGNLEHVSENGHHSSHKHDREPQRRSSVKRTRYYETYIRSDSGDEQLPTICREDPEIHGYFRDPHCLGEQEYFSSEECYEDDSSPTWSRQNYGYYSRYPGRNIDSERPRGYHHPQGFLEDDDSPVCYDSRRSPRRRLLPPTPASHRRSSFNFECLRRQSSQEEVPSSPIFPHRTALPLHLMQQQIMAVAGLDSSKAQKYSPSHSTRSWATPPATPPYRDWTPCYTPLIQVEQSEALDQVNGSLPSLHRSSWYTDEPDISYRTFTPASLTVPSSFRNKNSDKQRSADSLVEAVLISEGLGRYARDPKFVSATKHEIADACDLTIDEMESAASTLLNGNVRPRANGDVGPLSHRQDYELQDFGPGYSDEEPDPGRDEEDLADEMICITTL

SEQ ID NO: 51 - DNA, 4942 bp, Homo sapiens
agcggggggaggagcgcgcggccgcgcaccacgcgtccggccgggccgagccgagctgggggcgcagagcgcgggaggcggcggcggcgcggagcccaggtggctccgctgccggatgggagtgccccagtgtgctggatgaagctggcgcatgcaccatgtcatcatgtgtctctagccagcccagcagcaaccgggccgccccccaggatgagctggggggcaggggcagcagcagcagcgaaagccagaagccctgtgaggccctgcggggcctctcatccttgagcatccacctgggcatggagtccttcattgtggtcaccgagtgtgagccgggctgtgctgtggacctcggcttggcgcgggaccggcccctggaggccgatggccaagaggtcccccttgactcctccgggtcccaggcccggccccacctctccggtcgcaagctgtctctgcaagagcggtcccagggtgggctggcagccggtggcagcctggacatgaacggacgctgcatctgcccgtccctgccctactcacccgtcagctccccgcagtcctcgcctcggctgccccggcggccgacagtggagtctcaccacgtctccatcacgggtatgcaggactgtgtgcagctgaatcagtataccctgaaggatgaaattggaaagggctcctatggtgtcgtcaagttggcctacaatgaaaatgacaatacctactatgcaatgaaggtgctgtccaaaaagaagctgatccggcaggccggctttccacgtcgccctccaccccgaggcacccggccagctcctggaggctgcatccagcccaggggccccattgagcaggtgtaccaggaaattgccatcctcaagaagctggaccaccccaatgtggtgaagctggtggaggtcctggatgaccccaatgaggaccatctgtacatggtgttcgaactggtcaaccaagggcccgtgatggaagtgcccaccctcaaaccactctctgaagaccaggcccgtttctacttccaggatctgatcaaaggcatcgagtacttacactaccagaagatcatccaccgtgacatcaaaccttccaacctcctggtcggagaagatgggcacatcaagatcgctgactttggtgtgagcaatgaattcaagggcagtgacgcgctcctctccaacaccgtgggcacgcccgccttcatggcacccgagtcgctctctgagacccgcaagatcttctctgggaaggccttggatgtttgggccatgggtgtgacactatactgctttgtctttggccagtgcccattcatggacgagcggatcatgtgtttacacagtaagatcaagagtcaggccctggaatttccagaccagcccgacatagctgaggacttgaaggacctgatcacccgtatgctggacaagaaccccgagtcgaggatcgtggtgccggaaatcaagctgcacccctgggtcacgaggcatggggcggagccgttgccgtcggaggatgagaactgcacgctggtcgaagtgactgaagaggaggtcgagaactcagtcaaacacattcccagcttggcaaccgtgatcctggtgaagaccatgatacgtaaacgctcctttgggaacccattcgagggcagccggcgggaggaacgctcactgtcagcgcctggaaacttgctcaccaaaaaaccaaccagggaatgtgagtccctgtctgagctcaaggggacaaaaaaaaaaaaaggacttgactccatgacgtcgaccgtggccgctggctggctggacaggcgggtgtgaggagttgcagacccaaacccacgtgcattttgggacaattgctttttaaaacgtttttatgccaaaaatccttcattgtgattttcagaaccacgtcagatataccaagtgactgtgtgtggggtttgacaactgtggaaaggcgagcagaaaactccggcggtctgaggccatggaggtggttgctgcatttgagagggagtagggggctagatgtggctcctagtgcaaaccggaaaccatggcaccttccagagccgtggtctcaaggagtcagagcagggctggccctcagtagctgcagggagctttgatgcaacttatttgtaagaaggatttttaaattttttatgggtagaattgtagtcaggaaaacagaaagggcttgaaatttaataagtgctgctggaaggggattttccaagcctggaagggtattcagcagctgtggtggggaaacatttctcctgaaagactgaacgtgtttcttcatgacagctgctcaaagcaggtttctgagatagctgaccgagctctggtaaatctctttgtcaaattacgaaaacttcagggtgaaatcctatgcttccatgtacattacatggcttaagattaaacaaaaacatttttcaagtctctaactagagtgaactctagagcacagtagttcagaaactatttagagcttccaggatatatttcacagcttcaggcatgtgatcagttagagccgatgaaacctatgcccgcctgtatatatattagcagcttagctagttcataacctgtatattctaaagactgctaaggttttgttttcattttaaatcctagctgattgttgtggtcaatgaaatacccagtttctggagggccaggtgggaaatgctttcactggaccaacacacaaatgatcatcctgaggatctgagcttccctagactccacacaataaccttggggcacccttttagagaagactgttgaaacccacagcactcgttggggtatgaggaaaccagggcttggcacaggaagttcccctttgtagctaaaagtccagaaagaaagggttcatctttttgacttccaactgatattgggaagtttggttgaggttcaagtgtgactccttccagagccacaggtaggggagtgtgaagttgagggggaggaaagctggaaggactctgccttgggagattcccagctctgctttccagcgcttggtggaatctgggctggggaaagacggcaccgggaaactctgcttccccattgtttccatctgatcagctgtggtgtgaggacttctcagacaaaggcaaggcctcgtgcacctgcccagcccattcatggagccctgggccttcttggcttccatagatcctaagctcttgactgtagtttagccagacttgttttgctatcttataagcagttcagaattagggaatgctggttttgaagagcaaaggacaggtagtctagagagggtcgtctggcctgcttgctgggtctttgtaacccagcacttcctcttgccctcctggctttatgtttatggggagaggactcaatagctccaccccttctggcaccagatggggcttggttagtttgcaataagcaccttgcagaggttaaagccagcgggtccctagtcttaggcccagcctgcttgtgtgggctctggcctggcctggtggctggcccagggggcagcagtgcttagagcttctgcagggcttctctwgtttacacagctgcatcagacaatgccatttctccccaccacggaaccttccatctaagatttcttccagggaatgccagcaatcaggcagcacccagctgtgggggcagtggggtgggggagacccacattgatgactttttttttttcttttaatgaagaaacaccaaagaaagctgtggaaaggacctgccccacatgaaaaggataagccaagatggctgtaaacacagagcatttgagctgccactcttggagcacattgatttttcaaaagccagctctgtcaggaaaggaggtgctgttatgagcagctcttccagtgggcaaagaggacgcccataatttcttccattgctagctcatctgtgggaccaatttggtgtaagcaacctgtggcctgcacttgtggcctcgaaggaagcacaaaccctccatccacttcccatttcctctgcccttttccacctcccccttccatcccaccagctgccagtggctcccagaaagccttattgagccccttgttgacacttggggctgcggaggcctctccctactggtctggcctttcctgagaggcaggtcttccgtcctcagagcctttctggaacaaggagaatgcctgtgcaggtggacacacaggcctggcctgtcgctctcacttgtcttccagcggggagcttcacgttgccgagtggaagaaccatgacctccacttgcttccaaggtgctagggaagtttcagggtacgctggttcccctctccagctggaggccgagtttctggggactgcagatttttctactctgtgatcgattcaatgcccgatgcttctgtttcattcccgaccctttctactatgcattttccttttatcaggtgtataaagttaaatactgtgtatttatcactaaaaagtacatgaacttaagagacaactaagcctttcgtgtttttccacaggtgtttaagcttctctgtacagttgaaataaacagacagcaaaatggtgccaaaaaaacaaataccggacgaaccaacacagcgtccgccacctacctaagcacacgaacaacacaccagagggcgcggcagaaaaaatctcccaagggagcacacaacatgagccccaactgtgtaacgggcccctaggggccgataaacacgagccggcgcgtcaacgcggagcaggaacacgagcgggacttggacgcccactaggcggtgatgggccaccccagaattaacgcggaaactcgggttggcacagcagcgcggtgatgctgtttattatcgcagagatggacgccgcgcagtgacgatacagtctacccaaaggtgagttggcgccac

SEQ ID NO: 52 - protein, 556 aa, Homo sapiens [sequence omitted]

SEQ ID NO: 53 - DNA, 1804 bp, Homo sapiens
atgaacggacgctgcatctgcccgtccctgccctactcacccgtcagctccccgcagtcctcgcctcggctgccccggcggccgacagtggagtctcaccacgtctccatcacgggtatgcaggactgtgtgcagctgaatcagtataccctgaaggatgaaattggaaagggctcctatggtgtcgtcaagttggcctacaatgaaaatgacaatacctactatgcaatgaaggtgctgtccaaaaagaagctgatccggcaggccggctttccacgtcgccctccaccccgaggcacccggccagctcctggaggctgcatccagcccaggggccccattgagcaggtgtaccaggaaattgccatcctcaagaagctggaccaccccaatgtggtgaagctggtggaggtcctggatgaccccaatgaggaccatctgtacatggtgttcgaactggtcaaccaagggcccgtgatggaagtgcccaccctcaaaccactctctgaagaccaggcccgtttctacttccaggatctgatcaaaggcatcgagtacttacactaccagaagatcatccaccgtgacatcaaaccttccaacctcctggtcggagaagatgggcacatcaagatcgctgactttggtgtgagcaatgaattcaagggcagtgacgcgctcctctccaacaccgtgggcacgcccgccttcatggcacccgagtcgctctctgagacccgcaagatcttctctgggaaggccttggatgtttgggccatgggtgtgacactatactgctttgtctttggccagtgcccattcatggacgagcggatcatgtgtttacacagtaagatcaagagtcaggccctggaatttccagaccagcccgacatagctgaggacttgaaggacctgatcacccgtatgctggacaagaaccccgagtcgaggatcgtggtgccggaaatcaagctgcacccctgggtcacgaggcatggggcggagccgttgccgtcggaggatgagaactgcacgctggtcgaagtgactgaagaggaggtcgagaactcagtcaaacacattcccagcttggcaaccgtgatcctggtgaagaccatgatacgtaaacgctcctttgggaacccattcgagggcagccggcgggaggaacgctcactgtcagcgcctggaaacttgctcaccaaaaaaccaaccagggaatgtgagtccctgtctgagctcaagacctagaaaataagtccccttcctgcctgttgcaaagtaacgtaagagttccctcacccgagtggatgcagacgttcttgctgtcagccaccttccttcatacacatagccagcccagggtgaccagaacgtcccaggacagatgaggctttgtgtccttatgagagtgggagaacctggtgggcacccctggtgcaggtgctgtggtgggtggggaccccactgcctttcccactgagcacatcatggctacctgacttggtgggagttccattcagtcacttctgtttcttaaacatagctttactgaggtacaattcacataccatgtaattcacccacgggaagtgtatgattcagtggtttctaatacacacttctgcagccattaccaccgtcaactttacgacattttcatcagcccaagaagacaccctacactccttagctgtccccatccaactcccccaccccagtaaccactcagaataggtatggatttgcctattctggacgtttcgtataaatggcgtcatacactaaaaaaaaaaaaaaa

SEQ ID NO: 54 - protein, 417 aa, Homo sapiens
MNGRCICPSLPYSPVSSPQSSPRLPRRPTVESHHVSITGMQDCVQLNQYTLKDEIGKGSYGVVKLAYNENDNTYYAMKVLSKKKLIRQAGFPRRPPPRGTRPAPGGCIQPRGPIEQVYQEIAILKKLDHPNVVKLVEVLDDPNEDHLYMVFELVNQGPVMEVPTLKPLSEDQARFYFQDLIKGIEYLHYQKIIHRDIKPSNLLVGEDGHIKIADFGVSNEFKGSDALLSNTVGTPAFMAPESLSETRKIFSGKALDVWAMGVTLYCFVFGQCPFMDERIMCLHSKIKSQALEFPDQPDIAEDLKDLITRMLDKNPESRIVVPEIKLHPWVTRHGAEPLPSEDENCTLVEVTEEEVENSVKHIPSLATVILVKTMIRKRSFGNPFEGSRREERSLSAPGNLLTKKPTRECESLSELKT

SEQ ID NO: 55 - DNA, 2116 bp, Homo sapiens
cggttctccaagcacccagcatcctgctagacgcgccgcgcaccgacggaggggacatgggcagagcaatggtggccaggctggggctggggctgctgctgctggcactgctcctacccacgcagatttattccagtgaaacaacaactggaacttcaagtaactcctcccagagtacttccaactctgggttggccccaaatccaactaatgccaccaccaaggcggctggtggtgccctgcagtcaacagccagtctcttcgtggtctcactctctcttctgcatctctactcttaagagactcaggccaagaaacgtcttctaaatttccccatcttctaaacccaatccaaatggcgtctggaagtccaatgtggcaaggaaaaacaggtcttcatcgaatctactaattccacaccttttattgacacagaaaatgttgagaatcccaaatttgattgatttgaagaacatgtgagaggtttgactagatgatgaatgccaatattaaatctgctggagtttcatgtacaagatgaaggagaggcaacatccaaaatagttaagacatgatttccttgaatgtggcttgagaaatatggacacttaatactaccttgaaaataagaatagaaataaaggatgggattgtggaatggagattcagttttcattggttcattaattctataaggccataaaacaggtaatataaaaagcttccatcgatctatttatatgtacatgagaaggaatccccaggtgttactgtaattcctcaacgtattgtttcgacggcactaatttaatgccgatatactctagatgaatgtttacattgttgagctattgctgttctcttgggaactgaactcactttcctcctgaggctttggatttgacattgcatttgaccttttaggtagtaattgacatgtgccagggcaatgatgaatgagaatctaccccagatccaagcatcctgagcaactcttgattatccatattgagtcaaatggtaggcatttcctatcacctgtttccattcaacaagagcactacattcttttagctaaacggattccaaagagtagaattgcattgaccacgactaatttcaaaatgctttttattattattattttttagacagtctcactttgtcgcccaggccggagtgcagtggtgcgatctcagatcagtgtaccatttgcctcccgggctcaagcgattctcctgcctcagcctcccaagtagctgggattacaggcacctgccaccatgcccggctaatttttgtaattttagtagagacagggtttcaccatgttgcccaggctggtttagaactcctgacctcaggtgatccacccgcctcggcctcccaaagtgctgggattacaggcttgagcccccgcgcccagccatcaaaatgctttttatttctgcatatgtttgaatactttttacaatttaaaaaaatgatctgttttgaaggcaaaattgcaaatcttgaaattaagaaggcaaaatgtaaaggagtcaaactataaatcaagtatttgggaagtgaagactggaagctaatttgcataaattcacaaacttttatactctttctgtatatacattttttttctttaaaaaacaactatggatcagaatagcaacatttagaacactttttgttatcagtcaatatttttagatagttagaacctggtcctaagcctaaaagtgggcttgattctgcagtaaatcttttacaactgcctcgacacacataaacctttttaaaaatagacactccccgaagtcttttgtttgtatggtcacacactgatgcttagatgttccagtaatctaatatggccacagtagtcttgatgaccaaagtcctttttttccatctttagaaaactacatgggaacaaacagatcgaacagttttgaagctactgtgtgtgtgaatgaacactcttgctttattccagaatgctgtacatctattttggattgtatattgtggttgtgtatttacgctttgattcatagtaacttcttatggaattgatttgcattgaacgacaaactgtaaataaaaagaaacggtg

SEQ ID NO: 56 - protein, 80 aa, Homo sapiens
MGRAMVARLGLGLLLLALLLPTQIYSSETTTGTSSNSSQSTSNSGLAPNPTNATTKAAGGALQSTASLFVVSLSLLHLYS

SEQ ID NO: 57 - DNA, 4122 bp, Homo sapiens
acattgtagcaaaatggcgactgtcattcacaaccccctgaaagcgctcggggaccagttctacaaggaagccattgagcactgccggagttacaactcacggctgagtgcagagcgcagcgtgcgtcttcccttcctggactcacagactggggtggcccagaacaactgctacatctggatggagaagaggcaccgaggcccaggccttgccccgggccagctgtatacataccctgcccgctgctggcgcaagaagagacgattgcacccacctgaagatccaaaactgcggctgctggagataaaacctgaagtggagcttcccctgaagaaggatgggttcacctcagagagcaccacgctggaagccttgctccgtggcgagggggttgagaagaaggtggatgccagggaggaggaaagcatccaggaaatacagagggttttggaaaatgatgaaaatgtagaagaagggaatgaagaagaggatttggaagaggatattcccaagcgaaaggacaggactagaggacgggctcgctgccctctcccttccctgcactgtttttcctcccttccctctgccgtgatagatgctaaggagtggggtggaggtgggaagtgggaagcaacagtggcgtataggaaaaagaaaatataccccgtgcacattttcaacatgtagttgaagaagcctaaattaggtactagaaaaaaaaaaaggacagaaacactgcctgatatgtgagcaagagcatgaaaatatagaatgattatctcagagcagaggaggtggggagcaggtggctggagagaggcggggtaggtaggcagggcgtccctggctcaccaatgcgtctggtccacatggcatttgggaaagcagatgggtcatgcttttgcaatgaatggtcagatgcttagggggcatttgtgctcctctggccaggaaagggaacagagtccatccaagctgccccccactcatctgccatggttgtccaccctgggggtttttcctctgaaggaaaatgaacccatcttttgcctgccatgaatcattgcagggcaggctgttactggctaaattaaaacccttggcagggcatcgactgtgtgcgaggcaatgctctaggtcctgtaggggctggaaaataaaccgcatgctggcctagccttcaagttgcttttcagccatgaaactaagctctgccaagcaatcgtgattgtaggtcaagtatcgcgccatcacggaaggtgtaagtatatgtaggtttctctgttgaggatgcgtgttcctcagtagaagacaagcaggtggaggcatccagtgatttctaccctgtggaggctgaggggtcgggggaagaaaacagatgacctcagcctagttgctttaatctgcttttccaagcactggatgcccttggatgacagcatcctcagcattaaaactggtgaactgatgaagtcacctggcctggagtgtgttgggcagccagtgtccccagagctgcttgtgggtttctggggtggaaggcagggaggtgcaactggcagggcctgatcagaggcagaaaatgacccccacagtggtcttttccctgctagagaaagcagagagcgggactgggggggtgggggcttcaagtacagattgggcacactccaccagaccccagcaaggtcagctgccccacgcctgtatctggcactgctggtgtgtgcagggatgaaacccagcatcagagaggttttcagcaaaccttccatgctcacctttggccaggtgcttgtcagatcctagcttcgtgctggcttagactctcagttgtttgtgttgacagcattaggaataaaccgtttgtttcatctttccttttctccacacgtgtcacagccagatttcagctttgagttattccctgaagaagccacaccaaccttgctttcaagcaaaatgcctgggcttgggggaaggtgtgtatctgtccatgtgtggatgtcggctcagagctatagcttctctgtggggggtggcccaagggaaggctcctctggggccctggatggcacatgactcccagtgaggagaattcaggtgatctctgtggaggtagtcagggacacaaggcttggctgtgagtctggttttaaagtgcgtgacagcctgaaaagcatgcaggggtttggtccactcacctacttgaaagcctgtgggcaacgttcttttgagccaagacttctctgaatggccctgctggtggaaggggtgaggcaaaggcctctgacttggaccctttccacaccagactggcagcacttcccccaggcagccagtggtgggccctgagccctcaggtccccagctccttgagggatgaacctgggagcccaagagccagtggctgagctctgagaaggctccatctcccacctgcccttgagcgcgctctcaggctgagaacacggtctcatcaggcgccttcctggcctgatgctgtgctgtctacgtcacacggtcgattcacaaaagccagaactagacctcaaccaggtcatctccccgttgccaagtgggttcagggtgagggcaatttgtaagctcaatttctctgacagccaagacatggagcatctctgctaagaagccaaaagaaattggttttcttcttctcattgctgaagcccctctgtgtctcttctcagggacaggctggtccagtggctttggtgagggcgcctccatttgtgaacgctgggattcctctgggtgggctttggcaggtggctcctatggtaggaaggatgaccaggtccctgggaatgagctgcctacctgctgctccacgaggaagctcaggcctgcacaggctccaccaggccttggatgccctctagttgagtcagagaccctggaaacacactgagatctccaattgctgcctccattgatgtctctagacctgcagatacgaagcaaacctgggattgcttcttccaggtatgggcaccagagagggaggccactgcaacattttatccccatcattccaaaatgcttgcttgtctcttttacctcacactcacaactccttctgagactctcagtcataaaggaatgaccaagagagtgggtctccagtgagagaaatgcctatgaaagagggtttccctttttgctcttttgaacaccctccccactgatccttgggacccaacgccgcattgcctcttgcagatgaggttttgccttgggctgcttgggtacttcagaccaggactgagtctgacacagctttcatgaggttacagaaaagggctacagatttgggaagctgtgtgtaatggtcttgagacaatatctccatttggcccaccctggcttctctaaaaagcaacgacagcaacagacaaacaaaaagctcccacctcccaccccgttagctgtcctcctccttcactgtgatgtggttgcggtctctgtaggtgtgtgtgccacccttgtcctctgtcctctggggatgtgcccttcccacgtgtgtcaggttcccactctttcgtggttcctaacgtgaagtgctgtgatgtttctgccctgcctaaggaacgtatcaagctctctcagtgtttcagtgttggagattgaggctgtgccacatcttctgccatcctaaggggacatgatggttctgtgattcccagagagctggcagattgtgacaatctccaggagaacctacagattggaagcagcccacacctgatgtggactcctgtcccgggactcactcttcattcagaagactggtggcccacgtgccaggaccaccccacctctcttgctgccttttctcctgtcctgatggggttctgggagggagacctgtcgctgatgagatgaagaatgtggggatcgagcagccttcttctttgggacccctcgatatcccatggaatgctcgcacgttctcaaagactgagtcacaagcccctaccccttccttgctgtggttagtatcttgttctgtgattggttagcaatgttgactacccacgtagtgaatcttttgtctgcaatttagagaatgtgtaaacaaataaaaggctttaaaactc

SEQ ID NO: 58 - protein, 224 aa, Homo sapiens
MATVIHNPLKALGDQFYKEAIEHCRSYNSRLSAERSVRLPFLDSQTGVAQNNCYIWMEKRHRGPGLAPGQLYTYPARCWRKKRRLHPPEDPKLRLLEIKPEVELPLKKDGFTSESTTLEALLRGEGVEKKVDAREEESIQEIQRVLENDENVEEGNEEEDLEEDIPKRKDRTRGRARCPLPSLHCFSSLPSAVIDAKEWGGGGKWEATVAYRKKKIYPVHIFNM

SEQ ID NO: 59 - DNA, 1414 bp, Homo sapiens
cgattgaggaacccatttcctcattctgcaaattgcaaacctgagggcccaaagagggacaggggcttgccaggtctcagcaggctgtgagcaagagctaaagcctaatcctcctgcctttgggctggagccttccttgtaccccagggtcagtgtctttgttggatacaggcttagattgactgactgtaccctgagaacctaggggagtccctgttcccaattcttctcctacccccaccttggcctgatggaggaagaccctgctgtgttgagatgagcaccagagccaagaagctgaggaggatctggagaattctggaggaagaggagagtgttgctggagctgtacagaccctgcttctcaggtcccaggaaggtggcgtcacatctgcagccgcgtcgacgttgtcggagcctccgcggaggacccaggagagccggactaggaccagggccctgggcctccccacactccccatggagaagctggcggcctctacagagccccaagggcctcggccggtcctgggccgtgagagtgtccaggtgcccgatgaccaagactttcgcagcttccggtcagagtgtgaggctgaggtgggctggaacctgacctatagcagggctggggtgtctgtctgggtgcaggctgtggagatggatcggacgctgcacaagatcaagtgccggatggagtgctgtgatgtgccagccgagacactctacgacgtcctacacgacattgagtaccgcaagaaatgggacagcaacgtcattgagacttttgacatcgcccgcttgacagtcaacgctgacgtgggctattactcctggaggtgtcccaagcccctgaagaaccgtgatgtcatcaccctccgctcctggctccccatgggcgctgattacatcattatgaactactcagtcaaacatcccaaatacccacctcggaaagacttggtccgagctgtgtccatccagacgggctacctcatccagagcacagggcccaagagctgcgtcatcacctacctggcccaggtggaccccaaaggctccttacccaagtgggtggtgaataaatcttctcagttcctggctcccaaggccatgaagaagatgtacaaggcgtgcctcaagtaccccgagtggaaacagaagcacctgcctcacttcaagccgtggctgcacccggagcagagcccgttgccgagcctggcgctgtcggagctgtcggtgcagcatgcggactcactggagaacatcgacgagagcgcggtggccgagagcagagaggagcggatgggcggcgcgggcggcgagggcagcgacgacgacacctcgctcacctgagcgacgcaccgcttcagggacggagacaggaccggcggagccctggggcggcggccgc

SEQ ID NO: 60 - protein, 359 aa, Homo sapiens
MSTRAKKLRRIWRILEEEESVAGAVQTLLLRSQEGGVTSAAASTLSEPPRRTQESRTRTRALGLPTLPMEKLAASTEPQGPRPVLGRESVQVPDDQDFRSFRSECEAEVGWNLTYSRAGVSVWVQAVEMDRTLHKIKCRMECCDVPAETLYDVLHDIEYRKKWDSNVIETFDIARLTVNADVGYYSWRCPKPLKNRDVITLRSWLPMGADYIIMNYSVKHPKYPPRKDLVRAVSIQTGYLIQSTGPKSCVITYLAQVDPKGSLPKWVVNKSSQFLAPKAMKKMYKACLKYPEWKQKHLPHFKPWLHPEQSPLPSLALSELSVQHADSLENIDESAVAESREERMGGAGGEGSDDDTSLT

SEQ ID NO: 61 - DNA, 2244 bp, Homo sapiens
acaccatcctcttagttgctcagactgaaaagctagcagccatcctggatttctctcacactgcctattcaacgtgtgaatgcatgagtggaaagctgagttcgcactcgtgactggccggggtcgactctgacattcactcccactttggcgcgctgatttgcctctgagcggatgaaggttgagccatggcgggcggggccggggaggcgggcttggagcgagggggcggggcaggcgccacaaaaacgcgctcgcgccggcgccgaaccgcaactcccggcgacccccgcgctcccgggtggcaagatggtggcgcgcaggaggaagtgcgcgcgcgggacccggagaccgtatcccgagcccactgcgtacgcagctattccaatcaagttctctgaaaagcaacaggcttctcactacctctatgtgagagcacacggcgttcgacaaggcaccaagtccacctggcctcagaagaggactctttttgtcctcaatgtgcccccatactgcacagaggagagcctgtcccgcctcctgtccacctgtggcctcgtccagtctgtagagttgcaggagaagccggacctggctgagagcccaaaggagtcaaggtcgaagttttttcatcccaagccagttccgggtttccaggtagcctatgtggtgttccagaagccaagtggggtgtcagcggccttggccctgaagggccccctgctggtgtccacagagagccaccctgtgaagagtggcattcacaagtggatcagtgactacgcagactctgtgcccgaccctgaggccctgagggtggaagtggacacgttcatggaggcatatgaccagaagatcgctgaggaagaagctaaggccaagggggaggagggggtccctgacgaggagggctgggtgaaggtgacccgccggggccggcgcctgtgctcccccggactgaggcagccagcttgcgggtgctggagagggagagacggaagcgcagcgaaaagagctgctcaacttctacgcctggcagcatcgagagagcaagatggagcatctagcgcagctcgcaagaagttcgaggaggacaagcagaggatcgagctgctgcgggcccagcgcaaattccgaccgtactgagctgtgagagccgcagtgaatggctggaggtgcagggccaggaggaggcgaggcagggcctgcagcggtctctgagaggccgagctctggccaacgggccccaggttgaaggccaccgcgtccaacagccccatcagagtccacacaggccaggagggaaggaccaggccacccctcgggtcttgtgcttcagcagtcctggggacccaggcgtgccgagaggaggacttgtccttcctgcttcttgcctccacaccctcctctccaggaccctggatgaatccgttctgtgcttccttttccctcaatgcaaaagcccttgctggcaacgaaaaagcctcaaaagcagtgagaatacaagaaccttttattttccatccagttgggcagcagggaaaggctaggtgggcccagcctgcccttccttcctccagctggctggatatttattattagccaggagaaagcagccctggaacccagactctgtctccctcttgaggtcacagatgttgaagttggaatctcgctccttcccctgactaccatcctaggctgggctcaagactagtgaggcctgtccccaccatccctggccttgttgtggggctcaggaactcagagtcccagtgttgagtctgggagcactaggtcttcatagttccaggcccagagctacagctgggctgggagcatgtgtgtgcactgtaagaaggagctgatgatactggccacgtgctggggttcgctcatgtggacacagtgattgcctgggacttccacaaactggaactgctctttgagggtggatttcatcgtgtctatcatgaacgacagggactccttctcagagtaattctgtcttgaatcaaaatatccgtggactgctttgatcaacaggacatggcctgcagcttcctgatggaatgcgcacacagctccctgctgatgaagtcaatgctgttctctgcccaggcgagcctctggtctctgttcagaaccagacctgtgggcaccttcgtggttcctctttgcaggagaactccccgcactcctcactcaagtggctattgctcttcagtaacctctgcagcagct

SEQ ID NO: 62 - protein, 323 aa, Homo sapiens
MKVEPWRAGPGRRAWSEGAGQAPQKRARAGAEPQLPATPALPGGKMVARRRKCARGTRRPYPEPTAYAAIPIKFSEKQQASHYLYVRAHGVRQGTKSTWPQKRTLFVLNVPPYCTEESLSRLLSTCGLVQSVELQEKPDLAESPKESRSKFFHPKPVPGFQVAYVVFQKPSGVSAALALKGPLLVSTESHPVKSGIHKWISDYADSVPDPEALRVEVDTFMEAYDQKIAEEEAKAKGEEGVPDEEGWVKVTRRGRRLCSPGLRQPACGCWRGRDGSAAKRAAQLLRLAASREQDGASSAARKKFEEDKQRIELLRAQRKFRPY

SEQ ID NO: 63 - DNA, 3111 bp, Homo sapiens
ggagtgcggggcgcccggcgccaggggagccgccacagccatggattgcaaagatagaccagcttttccagttaagaagttaatacaagcccgtctgccgtttaagcgcctgaatcttgtcccaaaggggaaagccgatgacatgtcagacgatcagggtacttctgtgcaaagtaaaagccccgatttagaggcctctttggacaccttggaaaacaactgtcatgtgggttctgacatagactttagaccgaaacttgtcaacgggaagggtcccttagataactttttaagaaatagaatcgaaaccagtattggccagagcacagtcatcattgatttgacagaggactcgaatgagcagccagacagtcttgtggaccacaataaactaaattctgaagcctctccctccagggaggcaataaatggccagcgagaagacactggggatcagcaggggttgttgaaggccattcagaacgacaagttggcatttcctggagagaccctttcagacattccttgcaaaacagaggaggagggtgttggctgtggaggtgcagggaggagaggcgactcccaggaatgttcgccacggagctgcccggagctgacgagtggcccgagaatgtgccccagaaaggagcaggacagttggagtgaagctgggggcatcctgttcaaagggaaggtgcctatggtggtcttgcaggacatcttggctgtgagaccaccgcaaatcaagtcccttccagccacaccccaaggcaagaacatgacccctgagagtgaggtgctggaatctttccccgaagaagactctgtactcagccattcgtccctgagctctccctcttccaccagctcgcccgaggggccgcctgctcccccaaagcagcacagcagtaccagtcccttccccacctccacgcccctccgcagaataactaagaaattcgtcaaaggctctacagagaagaacaagctcagactgcaaagagatcaggagcgtctgggcaagcagctcaagttacgtgcagaaagggaagaaaaggagaagctgaaagaggaggccaagcgggccaaggaggaggccaagaagaagaaggaggaagagaaggagcttaaggaaaaggagaggcgggagaagcgggagaaggatgagaaggagaaggcggagaagcagcggctcaaggaggagcggcgcaaggagagacaggaagccctggaggctaaacttgaggaaaaaaggaaaaaggaagaagagaaacggttaagagaagaagagaagcgcattaaagcagagaaggccgaaatcacgaggttcttccagaaaccaaagactccacaggcccccaagaccctggccggctcctgtgggaagtttgccccctttgaaattaaagagcacatggtcctggcccctcggcgtcggaccgctttccatccagacctctgcagtcagctggaccagctcctccagcagcagagcggcgagttctccttcttgaaagacctcaaaggccggcagcccctgaggtccggacccacgcacgtttccacccggaatgcagatatttttaacagtgatgtcgtcatcgtggagcgtgggaagggcgacggtgttcccgagaggaggaagtttggcaggatgaagctcctgcagttctgtgagaaccaccggcctgcctactggggtacctggaataagaagacggcactcatccgcgcgcgagacccctgggcccaggacacgaagctcctggactatgaggtggacagtgatgaggagtgggaagaagaggagcctggggagtccctgtcccacagtgagggggatgatgatgacgacatgggagaggatgaagatgaggacgatggtttctttgtgccccatgggtacctgtctgaggacgaaggtgtgacagaggagtgtgccgaccctgagaaccataaggtccgccagaaactgaaggccaaggagtgggacgagttcctggctaaggggaagcgctttcgcgtcctgcaacctgtgaagatcggctgcgtgtgggcggctgacagagactgcgcaggcgatgacctgaaggtactgcagcagttcgcagcctgcttcctggagaccctgccggcccaggaggagcagacgcccaaggcctccaagcgggagaggagagacgagcagatcctggcccagctgctgccgctcctgcacggcaatgtgaacgggagcaaggtcatcatccgggagttccaggagcactgccgccggggactgctcagcaaccacaccggcagcccgcggacgccctccaccacctacctgcacacccccacccccagcgaggatgccgccatcccctctaagtcccggctcaagcggctcatttccgagaactcagtgtatgagaagcggcctgacttcaggatgtgctggtacgtgcacccgcaggtgctacagagcttccagcaggagcacctgcccgtgccgtgccagtggagctatgtgacatcggtgccctcggcccccaaagaggacagtggcagcgtcccctccacggggcccagccagggcactcccatctcgctgaagaggaagtcagcgggcagcatgtgcatcacccaattcatgaagaagcgcaggcacgacggccagattggtgctgaagacatggacggcttccaggcagacacggaggaggaggaagaggaggagggcgactgtatgatcgtggatgtcccggatgctgtggaggtccaagccccgtgtggagccgcttccggagctgggggtggtgtgggggtggacaccggcaaggccaccctgaccgcgagcccactgggtgcatcctgagagcaggggtgacgtatgtagaacgcttagggtgtcctccccacagagcagatacttgaaccgactcaattcctgtgtaaagagcactttgtcctgcttcacggacctccccaaagtgtgcagagttctatataggatgctggattagttcctttgatatttgtaaaaattcccccaagagccgcatatgaatctgccctttaataaagcattattgagattgctggcctattggggaagctgcgggcacagga

SEQ ID NO: 64 - protein, 938 aa, Homo sapiens
MDCKDRPAFPVKKLIQARLPFKRLNLVPKGKADDMSDDQGTSVQSKSPDLEASLDTLENNCHVGSDIDFRPKLVNGKGPLDNFLRNRIETSIGQSTVIIDLTEDSNEQPDSLVDHNKLNSEASPSREAINGQREDTGDQQGLLKAIQNDKLAFPGETLSDIPCKTEEEGVGCGGAGRRGDSQECSPRSCPELTSGPRMCPRKEQDSWSEAGGILFKGKVPMVVLQDILAVRPPQIKSLPATPQGKNMTPESEVLESFPEEDSVLSHSSLSSPSSTSSPEGPPAPPKQHSSTSPFPTSTPLRRITKKFVKGSTEKNKLRLQRDQERLGKQLKLRAEREEKEKLKEEAKRAKEEAKKKKEEEKELKEKERREKREKDEKEKAEKQRLKEERRKERQEALEAKLEEKRKKEEEKRLREEEKRIKAEKAEITRFFQKPKTPQAPKTLAGSCGKFAPFEIKEHMVLAPRRRTAFHPDLCSQLDQLLQQQSGEFSFLKDLKGRQPLRSGPTHVSTRNADIFNSDVVIVERGKGDGVPERRKFGRMKLLQFCENHRPAYWGTWNKKTALIRARDPWAQDTKLLDYEVDSDEEWEEEEPGESLSHSEGDDDDDMGEDEDEDDGFFVPHGYLSEDEGVTEECADPENHKVRQKLKAKEWDEFLAKGKRFRVLQPVKIGCVWAADRDCAGDDLKVLQQFAACFLETLPAQEEQTPKASKRERRDEQILAQLLPLLHGNVNGSKVIIREFQEHCRRGLLSNHTGSPRTPSTTYLHTPTPSEDAAIPSKSRLKRLISENSVYEKRPDFRMCWYVHPQVLQSFQQEHLPVPCQWSYVTSVPSAPKEDSGSVPSTGPSQGTPISLKRKSAGSMCITQFMKKRRHDGQIGAEDMDGFQADTEEEEEEEGDCMIVDVPDAVEVQAPCGAASGAGGGVGVDTGKATLTASPLGAS

SEQ ID NO: 65 - DNA, 3173 bp, Homo sapiens
tgatgtgatatggctgcaagtgcctttgacccttttgtctcccttccataaactgaaatacctaagctgctccaacctcctttttgtcttttgtttcataaatcctttcccattgcacatcaactcctgtctctctttgtactgtcactctcatctgttgctttccattcacactgcctttagccactcatcattttgtgcctacaccacagaaacctctgaatgtaatggatgttcctaccagaggacaagtcgtacaatggtggaggaataggttcttcaaataggatcatggacttcttggaggagccaatccctggtgtagggacctatgatgatttcaatacaattgattgggtgagagagaagtctcgagaccgggataggcaccgagagattaccaataaaagcaaagagtcaacatgggccttaattcacagtgtgagtgatgctttttccggctggttgttgatgctccttattgggcttttatcaggttcgttagctggtttgatagacatctctgctcattggatgacagacttaaaagaaggtatatgcacagggggattctggtttaaccatgaacattgttgctggaactctgagcatgtcacctttgaagagagagacaaatgtccagagtggaatagttggtcccagcttatcatcagcacagatgagggagcctttgcctacatagtcaattatttcatgtacgtcctctgggctctcctatttgccttccttgccgtatctcttgtcaaggtgtttgcgccttatgcctgtggctctggaatccctgagataaaaactatcttgagtggtttcattattaggggctatttgggtaagtggactctggttatcaaaaccatcaccttggtgctggcagtgtcgtctggcttgagcctgggcaaagagggccctctagtgcacgtggcttgctgctgtgggaacatcctgtgccactgcttcaacaaatacaggaagaatgaagccaagcgcagagaggtcttgtcggctgcagcagcagctggtgtatctgtagcctttggagcacctataggtggagtattattcagccttgaagaggtcagctactattttcccctcaaaacattgtggcgttcattctttgctgccttggtggcagcattcactctacgctccatcaatccatttgggaacagccgcctggtactattttatgtggagtttcacaccccatggcatctctttgagctcgtgccattcattctgctgggcatatttggtggtctgtggggagcactgtttatccgcacaaacattgcctggtgtcggaagcgaaagaccacccagttgggcaagtatcctgttatagaggtactcgtcgtgacagccatcactgccatcctggctttccccaatgaatacactcggatgagcacaagtgagctcatttctgagctgtttaatgactgtggccttctggactcctccaagctctgtgattatgagaaccgtttcaacacaagcaaagggggtgaactgcctgacagaccggctggcgtgggagtctacagtgcaatgtggcagctggctttaacactcatactgaaaattgtcattactatattcacctttggcatgaagatcccttctggcctctttatccctagcatggctgttggtgctatagcaggtcgacttctaggagtaggaatggaacagctggcttattaccaccaggaatggaccgtcttcaatagctggtgtagtcagggagctgattgcatcacccccggcctttatgcaatggttggggctgcagcctgcttaggtggggtgactcggatgactgtttctcttgttgtcataatgtttgaactgactggtggcttagaatacatcgtgcctctgatggctgcagccatgacaagcaagtgggtggcagatgctcttgggcgggagggcatctatgatgcccacatccgtctcaatggatacccctttcttgaagccaaagaagagtttgctcataagaccctggcaatggatgtgatgaaaccccggagaaatgatcctttgttgactgtccttactcaggacagtatgactgtggaagatgtagagaccataatcagtgaaaccacttacagtggcttcccagtggtggtatcccgggagtcccaaagacttgtgggctttgtcctccgaagagatctcattatttcaattgaaaatgctcgaaagaaacaggatggggttgttagcacttccatcatttatttcacggagcattctcctccattgccaccatacactccacccactctaaagcttcggaacatcctcgatctcagccccttcactgtgactgaccttacacccatggagatcgtagtggatattttccgaaagctgggactgcggcagtgcctggttacacacaacgggcgattgcttggaatcattaccaaaaaggatgtgttaaagcatatagcacagatggcgaaccaagatcctgattccattctcttcaactagaatcatagagttctggatgtaaagcgggaaggacattacagaccatggatatgttgtttaacggtacccaaaacacattttccatatttggatggtgaagtcacattagtgtgttgtctctttcctacaagttaaccagttgcactacataatctctggaaattaattttctctttaggagaaattatagttaggcttccatgatgttacattaggaagatatcatgaaagaataaataagattgctatggtttaattatatttgctttttaaaagatttttttaacttaaaaagtagttagccaatatgcaatcactgaaaactatgcaagagaaattccaaccgtcctgacctataacctgtaggaaaccgacgaaaaagtcactcttttgggatctaactgttgttactggaagacgaaggtaaactaaggggctttgcttttcaaaccagagaaaggaaagccagaaggaaaagagtaatggtattttctagactgtgaagattcagttcaaatgttatccttgttcctgttacaatatttagcattattagtttgttatgtgtgtatgtttatgttaattttaatttctgattataagacaatgctgctttggttaatctcttctaaaggaattta

SEQ ID NO: 66 - protein, 746 aa, Homo sapiens
MDFLEEPIPGVGTYDDFNTIDWVREKSRDRDRHREITNKSKESTWALIHSVSDAFSGWLLMLLIGLLSGSLAGLIDISAHWMTDLKEGICTGGFWFNHEHCCWNSEHVTFEERDKCPEWNSWSQLIISTDEGAFAYIVNYFMYVLWALLFAFLAVSLVKVFAPYACGSGIPEIKTILSGFIIRGYLGKWTLVIKTITLVLAVSSGLSLGKEGPLVHVACCCGNILCHCFNKYRKNEAKRREVLSAAAAAGVSVAFGAPIGGVLFSLEEVSYYFPLKTLWRSFFAALVAAFTLRSINPFGNSRLVLFYVEFHTPWHLFELVPFILLGIFGGLWGALFIRTNIAWCRKRKTTQLGKYPVIEVLVVTAITAILAFPNEYTRMSTSELISELFNDCGLLDSSKLCDYENRFNTSKGGELPDRPAGVGVYSAMWQLALTLILKIVITIFTFGMKIPSGLFIPSMAVGAIAGRLLGVGMEQLAYYHQEWTVFNSWCSQGADCITPGLYAMVGAAACLGGVTRMTVSLVVIMFELTGGLEYIVPLMAAAMTSKWVADALGREGIYDAHIRLNGYPFLEAKEEFAHKTLAMDVMKPRRNDPLLTVLTQDSMTVEDVETIISETTYSGFPVVVSRESQRLVGFVLRRDLIISIENARKKQDGVVSTSIIYFTEHSPPLPPYTPPTLKLRNILDLSPFTVTDLTPMEIVVDIFRKLGLRQCLVTHNGRLLGIITKKDVLKHIAQMANQDPDSILFN

SEQ ID NO: 67 - DNA, 2710 bp, Homo sapiens
cgccggcgggactggtctgaagagacgcggggacaaagtggcaacgacttggacatctgagctgtcactgccgaaaacaggccgcaagagagataatcaatatgcatttccaagccttttggctatgtttgggtcttctgttcatctcaattaatgcagaatttatggatgatgatgttgagacggaagactttgaagaaaattcagaagaaattgatgttaatgaaagtgaactttcctcagagattaaatataagacacctcaacctataggagaagtatattttgcagaaacttttgatagtggaaggttggctggatgggtcttatcaaaagcaaagaaagatgacatggatgaggaaatttcaatatacgatggaagatgggaaattgaagagttgaaagaaaaccaggtacctggtgacagaggactggtattaaaatctagagcaaagcatcatgcaatatctgctgtattagcaaaaccattcatttttgctgataaacccttgatagttcaatatgaagtaaattttcaagatggtattgattgtggaggtgcatacattaaactcctagcagacactgatgatttgattctggaaaacttttatgataaaacatcctatatcattatgtttggaccagataaatgtggagaagattataaacttcattttatcttcagacataaacatcccaaaactggagttttcgaagagaaacatgccaaacctccagatgtagaccttaaaaagttctttacagacaggaagactcatctttatacccttgtgatgaatccagatgacacatttgaggtgttagttgatcaaacagttgtaaacaaaggaagcctcctagaggatgtggttcctcctatcaaacctcccaaagaaattgaagatcccaatgataaaaaacctgaggaatgggatgaaagagcaaaaattcctgatccttctgccgtcaaaccagaagactgggatgaaagtgaacctgcccaaatagaagattcaagtgttgttaaacctgctggctggcttgatgatgaaccaaaatttatccctgatcctaatgctgaaaaacctgatgactggaatgaagacacggatggagaatgggaggcacctcagattcttaatccagcatgtcggattgggtgtggtgagtggaaacctcccatgatagataacccaaaatacaaaggagtatggagacctccactggtcgataatcctaactatcagggaatctggagtcctcgaaaaattcctaatccagattatttcgaagatgatcatccatttcttctgacttctttcagtgctcttggtttagagctttggtctatgacctctgatatctactttgataattttattatctgttcggaaaaggaagtagcagatcactgggctgcagatggttggagatggaaaataatgatagcaaatgctaataagcctggtgtattaaaacagttaatggcagctgctgaagggcacccatggctttggttgatttatcttgtgacagcaggagtgccaatagcattaattacttcattttgttggccaagaaaagtaaagaaaaaacataaagatacagagtataaaaaaaccgacatatgtataccacaaacaaaaggagtactagagcaagaagaaaaggaagagaaagcagccctggaaaaaccaatggacctggaagaggaaaaaaagcaaaatgatggtgaaatgcttgaaaaagaagaggaaagtgaacctgaggaaaagagtgaagaagaaattgaaatcatagaagggcaagaagaaagtaatcaatcaaataagtctgggtcagaggatgagatgaaagaagcagatgagagcacaggatctggagatgggccgataaagtcagtacgcaaaagaagagtacgaaaggactaaactagattgaaatatttttaattcccgagaggatgtttggcattgtaaaaatcagcatgccagacctgaactttaatcagtctgcacatcctgtttctaatatctagcaacattatattctttcagacatttattttagtccttcatttccgaggaaaaagaagcaactttgaagttacctcatctttgaatttagaataaaagtggcacattacatatcggatctaagagattaataccattagaagttacacagttttagttgtttggagatagttttggtttgtacagaacaaaataatatgtagcagcttcattgctattggaaaaatcagttattggaatttccacttaaatggctatacaacaatataactggtagttctataataaaaatgagcatatgttctgttgtgaagagctaaatgcaataaagtttctgtatggttgtttgattctatcaacaattgaaagtgttgtatatgacccacatttacctagtttgtgtcaaattatagttacagtgagttgtttgcttaaattatagattcctttaaggacatgccttgttcataaaatcactggattatattgcagcatattttacatttgaatacaaggataatgggttttatcaaaacaaaatgatgtacagattttttttcaagtttttatagttgctttatgccagagtggtttaccccattcacaaaatttcttatgcatacattgctattgaaaataaaatttaaatattttttcatcctgaaaaaaaa

SEQ ID NO: 68 - protein, 610 aa, Homo sapiens
MHFQAFWLCLGLLFISINAEFMDDDVETEDFEENSEEIDVNESELSSEIKYKTPQPIGEVYFAETFDSGRLAGWVLSKAKKDDMDEEISIYDGRWEIEELKENQVPGDRGLVLKSRAKHHAISAVLAKPFIFADKPLIVQYEVNFQDGIDCGGAYIKLLADTDDLILENFYDKTSYIIMFGPDKCGEDYKLHFIFRHKHPKTGVFEEKHAKPPDVDLKKFFTDRKTHLYTLVMNPDDTFEVLVDQTVVNKGSLLEDVVPPIKPPKEIEDPNDKKPEEWDERAKIPDPSAVKPEDWDESEPAQIEDSSVVKPAGWLDDEPKFIPDPNAEKPDDWNEDTDGEWEAPQILNPACRIGCGEWKPPMIDNPKYKGVWRPPLVDNPNYQGIWSPRKIPNPDYFEDDHPFLLTSFSALGLELWSMTSDIYFDNFIICSEKEVADHWAADGWRWKIMIANANKPGVLKQLMAAAEGHPWLWLIYLVTAGVPIALITSFCWPRKVKKKHKDTEYKKTDICIPQTKGVLEQEEKEEKAALEKPMDLEEEKKQNDGEMLEKEEESEPEEKSEEEIEIIEGQEESNQSNKSGSEDEMKEADESTGSGDGPIKSVRKRRVRKD

SEQ ID NO: 69 - DNA, 1504 bp, Homo sapiens
tgcagacggaacttcagccgctgcctctgttctcagcgtcagtgccgccactgcccccgccagagcccaccggccagcatgtcctctgctcacttcaaccgaggccctgcctacgggctgtcagccgaggttaagaacaagctggcccagaagtatgaccaccagcgggagcaggagctgagagagtggatcgagggggtgacaggccgtcgcatcggcaacaacttcatggacggcctcaaagatggcatcattctttgcgaattcatcaataagctgcagccaggctccgtgaagaagatcaatgagtcaacccaaaattggcaccagctggagaacatcggcaacttcatcaaggccatcaccaagtatggggtgaagccccacgacatttttgaggccaacgacctgtttgagaacaccaaccatacacaggtgcagtccaccctcctggctttggccagcatggcgaagacgaaaggaaacaaggtgaacgtgggagtgaagtacgcagagaagcaggagcggaaattcgagccggggaagctaagagaagggcggaacatcattgggcttcagatgggcagcaacaagtttgccagccagcagggcatgacggcctatggcacccggcgccacctctacgaccccaagctgggcacagaccagcctctggaccaggcgaccatcagcctgcagatgggcaccaacaaaggagccagccaggctggcatgactgcgccagggaccaagcggcagatcttcgagccggggctgggcatggagcactgcgacacgctcaatgtcagcctgcagatgggcagcaacaagggcgcctcgcagcggggcatgacggtgtatgggctgccacgccaggtctacgaccccaagtactgtctgactcccgagtacccagagctgggtgagcccgcccacaaccaccacgcacacaactactacaattccgcctaggtccacaaggccttcactgttttccccccaagggaggctgctgctgctcttggctggagccagccagggccagccgaccccctctccctgcatggcatcctccagcccctgtagaactcaacctctacagggttagagtttggagagagcagactggcggggggcccattggggggaaggggaccctccgctctgtagtgctacagggtccaacatagaacagggtgtccccaacagcgcccaaaggacgcactgagcaacgctattccagctgtccccccactccctcacaagtgggtacccccaggaccagaagctcccccagcaaagcccccagagcccaggctcggcctgcccccaccccattcccgcagtgggagcaaactgcatgcccagagacccagcggacacacgcggtttggtttgcagcgactggcatactatgtggatgtgacagtggcgtttgtaatgagagcactttcttttttttctatttcactggagcacaataaatggctgtaaaatctacacg

SEQ ID NO: 70 - protein, 297 aa, Homo sapiens
MSSAHFNRGPAYGLSAEVKNKLAQKYDHQREQELREWIEGVTGRRIGNNFMDGLKDGIILCEFINKLQPGSVKKINESTQNWHQLENIGNFIKAITKYGVKPHDIFEANDLFENTNHTQVQSTLLALASMAKTKGNKVNVGVKYAEKQERKFEPGKLREGRNIIGLQMGSNKFASQQGMTAYGTRRHLYDPKLGTDQPLDQATISLQMGTNKGASQAGMTAPGTKRQIFEPGLGMEHCDTLNVSLQMGSNKGASQRGMTVYGLPRQVYDPKYCLTPEYPELGEPAHNHHAHNYYNSA

SEQ ID NO: 71 - DNA, 3087 bp, Homo sapiens
aaacattttttggatgggacaacttgtatttgtccctttcgcttccacgtccaaacccctttaagaaggatgaatgggcaggatgagttagactccttcgctgtatcgtctactgattcttaaaatgtgacaaatctgattggacgacttacatggcttctggagttacagtgaatgatgaagtcatcaaagtttttaatgatatgaaagtaaggaaatcttctacacaagaggagatcaaaaagagaaagaaagcagttctcttctgtttaagcgatgacaaaagacaaataattgtagaggaagcaaagcagatcttggtgggtgacattggtgatactgtagaggacccctacacatcttttgtgaagttgctacctctgaatgattgccgatatgctttgtacgatgccacatacgaaacaaaagagtctaagaaagaagacctagtatttatattctgggctcctgaaagtgcacctttaaaaagcaagatgatttatgctagctctaaagatgccattaaaaagaaatttacaggtattaaacatgagtggcaagtaaatggcttggatgatattaaggaccgttcgacacttggagagaaattgggaggcaatgtagtagtttcacttgaaggaaaaccattataaaatgacagtcaagtgccatctggatcttaaggagcttccatttctccagctcagtccattggaatagtattaggttttggttttttgttgtatttccccctttccactgggcccttccaacacaatgaatgaaggaaatatcatttatttaagcagcctatcagtgattgccattagactgttgaatactgttacttttatatagaacccaaggaatgccttcctgtcatattttagccaaaacaactggttatatgcctcccttgcagcaagcactacaatgtgtgtgatcgtcaatgtgaatagcttagaatactgcaaaggataagctaattgaatgccttgaaagtattatccactggtcagatggtcaacttttttcagtattatttatagttggcacttgattgcagttctgtgaggcttgagcattcatacacctcacctgccttggcaagcctattttagtgatatggcagcacggatataacactatgcattaaaagcactttttgtaataagtttaatatcctaaaaggaatgccaattaagttttgttaactgtgtcatcaacttatcctagtacctcagtgttcattcctgttacctgcatatcttcttaaaagaaatagctgttattaatgcctttttgttttccattgagtgtacactactgaataagtgtaggagttttatgtttaccatgtgagtcctgcaacactaaagatattttgaatatcagtcatgatggcaatttctgtataaaagagccttaaatggaacattgttttgagatcaaactccccaccctcacaaaaatggccacgttgcaataaaaattgtggcatattacagaacgttgccttgttttccttggaaattttgcaaaatgttatgtgaaacaacttctagggtaaaaacagccattactaatctctgcactggtcatttgagaattttttttgtacagcattcatgtgtgatattttccagatttgttggatctatttggtttaaaaagtattctatcttaaggccaactaatataaaataccattgttaaagaatggtacttttataaacattagtgtatttatttcctatgtgttaatatgaagatcagaaattattttttgcactttggcataaatacttttcaatatctgatttgttctctggataaattagcatagttatttttttattcacatttacatttctaagtagttgtatagtagaagcaggaagctcttattgcttatttggtcgtaatgaaaataatttgtaaaatgtcctttaaaagtttaatgatacttctgatgtttcggaacagtcatttcacctactatttctgaatatattttgcaaattgaattggaataggaattgatatagcagtcttaaacattagtagtgggatttggctatggtccagactgtgctccttatagagaatttgatctgctcagtgtgagcggtttgctgttagccagggctatttatggcaaacacatgcttttgtatcttgtcatagttatccacaaaggcaaaactggacttgattctactggtatgcaaaacaggcatgctagtaagcagtcagtcgtggctcagaacttaaccccatagctcagaggaatgcttttagcagaaaacaggaaagaaaatatcccttaaaaattttttttgaatgtgtggaagtaattttagtataattagattttttccatatttttgaaagatttttcagatgtgaacattaaaaatagggattaaatgtctaggcttccatttaaaattatatgaatggtttgggatctttttgcactgagcaattttatttcaggcttccagctgtccctgtgagttatcctggacatttcgatggtttttggtaaggccaaactctgataagcaaaacagagaatactgacggtatacttaaccatatgtgtaactgatacttggcaccatggaatttttcattgagttatttcctcattcttttaaaaaataagggactataaatcagttatttagtatcttttgtttttgtagctgattccttaactttcttgtatgcctctagtaatttcagagattaaatattgctttaaactgtgatactttgatttgctagattgacaaaactgatactaatataattaagttcatctttgaaatacatctttgtgcgtagagccaaaaaaagagataaaattaataatagttcacttgttatttgagattaatttggcatttgaaatgatcattttattttacaatcatttataatgaatcaatgttccagttagctttaaaaggtatacggtgctaattagtaaaatattgaaggcaatattttactgctagcttgcaaagttatgagagtttaaaaaataaaatatatgaaaataaaaaaaaaaaaaaaaaa

SEQ ID NO: 72 - protein, 166 aa, Homo sapiens
MASGVTVNDEVIKVFNDMKVRKSSTQEEIKKRKKAVLFCLSDDKRQIIVEEAKQILVGDIGDTVEDPYTSFVKLLPLNDCRYALYDATYETKESKKEDLVFIFWAPESAPLKSKMIYASSKDAIKKKFTGIKHEWQVNGLDDIKDRSTLGEKLGGNVVVSLEGKPL

SEQ ID NO: 73 - DNA, 3954 bp, Homo sapiens
ggtgggtttatctcaaggcctgagtagccggtaacaaacgagggttcccgggattggaccgacgcaccatgcctctgcgacttgatatcaaaagaaagctaactgctagatctgatcgagttaagagtgtggatctgcatcctacagagccatggatgttggcaagtctttacaatggcagtgtgtgtgtttggaatcatgaaacacagacactggtgaagacatttgaagtatgtgatcttcctgttcgagctgcaaagtttgttgcaaggaagaattgggttgtgacaggagcggatgacatgcagattagagtgttcaattacaatactctggagagagttcatatgtttgaagcacactcagactacattcgctgtattgctgttcatccaacccagcctttcattctaactagcagtgatgacatgcttattaagctctgggactgggataaaaaatggtcttgctcacaagtgtttgaaggacacacccattatgttatgcagattgtgatcaaccccaaagataacaatcagtttgccagtgcctctttggacaggactatcaaggtgtggcagttgggctcttcgtcaccaaacttcactttggaaggacatgagaaaggcgtgaattgcattgattactacagtggtggggacaagccatacctcatttcaggtgcagatgaccgtcttgttaaaatatgggattatcagaataaaacatgtgtgcagacactggaaggacatgcccaaaatgtgtcttgtgccagctttcatcctgagttgccaatcattatcacaggttcagaagatggaacagtacgtatttggcattcaagcacctaccggcttgagagcacactgaattatggaatggagagggtatggtgcgtggccagtctaagagggtcaaacaatgtcgctttgggctatgatgaagggagcatcattgttaagcttggtcgggaggaacctgccatgtccatggatgccaatggaaagataatttgggccaagcattcagaagtccagcaggccaacctaaaagcaatgggagatgctgaaattaaagatggtgaaagattgccactggcagtaaaggatatgggcagttgtgaaatataccctcagactattcagcacaatcctaatgggcggtttgtggtggtgtgtggtgatggggagtatatcatctacacagcaatggcattgagaaacaagagctttggatctgctcaggagtttgcatgggcccacgattcttcagagtatgcaataagagagagcaacagcattgtaaagatatttaagaactttaaggaaaaaaaatcatttaaaccagattttggagcagaaagtatctacggcggcttcttattgggagtcagatctgtaaatggcttagccttctatgactgggacaatacagaactcatacgaagaattgaaattcagcccaaacatattttctggtctgactctggagagctagtctgtattgctactgaggaatcattttttatccttaagtatctgtcagaaaaagtcttggctgcacaggaaacacatgagggagttactgaagatggcattgaagatgcctttgaggttcttggtgagattcaggaaattgtgaaaacagggctttgggtaggcgattgcttcatttacacaagttctgtgaacagattaaattattatgttggaggagaaatagtcaccattgcccacttggacaggacgatgtatctcctaggctacattcctaaagacaacaggctttatctgggggataaagaattgaacatcattagctattccctgctggtttcagtcctggaataccagacagctgtcatgcggagggactttagcatggctgataaggtccttcctaccattccaaaagaacagaggaccagagttgcacactttttggaaaagcagggcttcaagcagcaagctcttacagtatccacagatcctgagcatcgttttgagcttgctcttcagcttggagagttaaaaattgcataccagttagcagtggaagcagagtcagaacagaagtggaaacaacttgctgaacttgccattagtaaatgtcagtttggcctagcccaggagtgcctgcatcatgcacaggattatgggggcctgctgcttttggccactgcctctggaaatgctaatatggtgaacaagctagcagagggtgcggagagagatggcaaaaataatgtggcattcatgagctactttttacagggcaaggttgatgcctgcctagagctcttaattagaactggacggctgccagaagctgccttcttggcccgaacttacttacccagtcaggtttcaagggtagtgaaactctggagagagaatctctcaaaagtcaatcagaaagcagcagaatcccttgctgacccaacagagtatgaaaacctgttccctggattaaaagaagcctttgttgttgaagaatgggtgaaggaaacacatgctgatctgtggccagccaaacaatacccacttgtcacgccaaatgaagagagaaatgtcatggaagagggaaaagactttcagccctcaagatctacagctcaacaggaacttgatgggaaacctgcttctcctactccggttattgtggcctcccacacagccaacaaagaagaaaagagtttactcgaactagaagtagatttggataatttggaattagaagatattgacacaacagatatcaatctggatgaagatattttggatgattgactgtaatgctttccatttacctgactaaacagatcattattatatataggtattgattgctaccctgaccacagtgctttggactatgagaaacttcttagatttttatatgtaaatgctgtggaccactgggagcacaatgcccacatcatcttaagaagagtttatgtgcagcatttaaatcactgtgttttccttgttaactaaaacagacatgggctttgatttttttcatactattagaccatatctcataaaaccttttgaattaatgaaggtacttgtttcctttctcaataatgaaaataggcttctagttttagaaggctgagccgaaactacaccttgcctagggatcagccccactgtcttttctttgtataactaaatctgcattttcaaatgttgtcaatcacatttttcttagagctgaatatccaggctgtaattctctaaaccctttttcttgacctcattgcatcattccacaggtcttgccccgattttgtctagcagctacccatttctggagtcaggatgtgaaacctctgttcctctgacctcattaagctgggggtctgtctaagttaacgtttgccctatttggtaacacaaaaacacaccagactttttaaccgtacgctcatctaacatgatttgagaaattcataaccaggcactcaaatatccttgtagcctacgaaaagtgagtagggtaataatttttgctttgtagggagaactacaaattgatatcttttaatctggccattttttaacatttagctcaatattaacagagaaatgtagtcagtatttagtaaaataaatgtatttttaaaatatttttaggaagctgcagaatggcgactgagtgcttcttgataagtctgcagtgttagttctatataggctcccttctgtgcttctgtttttgcaaagacctgtttaaattaaaaagaaaattttaaaacaataggacatatgctatttataaagtttttcagttttaagacatcattagcatttctgtagtagcaaagagtcctacttaaaaagggctttcagatttcacaatttttcccccgattatacaataattaataaacacacatggacagaaaaacaatacccaacacatttcaagcaatactaattctaaaca

SEQ ID NO: 74 - protein, 906 aa, Homo sapiens
MPLRLDIKRKLTARSDRVKSVDLHPTEPWMLASLYNGSVCVWNHETQTLVKTFEVCDLPVRAAKFVARKNWVVTGADDMQIRVFNYNTLERVHMFEAHSDYIRCIAVHPTQPFILTSSDDMLIKLWDWDKKWSCSQVFEGHTHYVMQIVINPKDNNQFASASLDRTIKVWQLGSSSPNFTLEGHEKGVNCIDYYSGGDKPYLISGADDRLVKIWDYQNKTCVQTLEGHAQNVSCASFHPELPIIITGSEDGTVRIWHSSTYRLESTLNYGMERVWCVASLRGSNNVALGYDEGSIIVKLGREEPAMSMDANGKIIWAKHSEVQQANLKAMGDAEIKDGERLPLAVKDMGSCEIYPQTIQHNPNGRFVVVCGDGEYIIYTAMALRNKSFGSAQEFAWAHDSSEYAIRESNSIVKIFKNFKEKKSFKPDFGAESIYGGFLLGVRSVNGLAFYDWDNTELIRRIEIQPKHIFWSDSGELVCIATEESFFILKYLSEKVLAAQETHEGVTEDGIEDAFEVLGEIQEIVKTGLWVGDCFIYTSSVNRLNYYVGGEIVTIAHLDRTMYLLGYIPKDNRLYLGDKELNIISYSLLVSVLEYQTAVMRRDFSMADKVLPTIPKEQRTRVAHFLEKQGFKQQALTVSTDPEHRFELALQLGELKIAYQLAVEAESEQKWKQLAELAISKCQFGLAQECLHHAQDYGGLLLLATASGNANMVNKLAEGAERDGKNNVAFMSYFLQGKVDACLELLIRTGRLPEAAFLARTYLPSQVSRVVKLWRENLSKVNQKAAESLADPTEYENLFPGLKEAFVVEEWVKETHADLWPAKQYPLVTPNEERNVMEEGKDFQPSRSTAQQELDGKPASPTPVIVASHTANKEEKSLLELEVDLDNLELEDIDTTDINLDEDILDD

SEQ ID NO: 75 - DNA, 3780 bp, Homo sapiens
cgattaatcctccagttggttgtccctgccgtctcggaagggttagcacacagccaggtctgtttttgatgtatgtaattgaagatttataaagaaaagcttctcctctgcctcatccacagtcattttttttccaatgccagttcccagcaggcatataaatattggtcgttctcagagctgggatgctgctgggtggtacgagggcccctgggagaacgccgagtccctgcggcctctggggaggagaagctccctgacgtatggcacagcagaggggacttggtttgagccaaaccaccgaccacaggacgctgccctgcccgtggccgccgagccctacctgtaccgggaggccgtttataactcagtggctgcaagaaaggggtctactcctgacttcaccttctacgacagcagacaggcagtgatgtctggtcgcagccccctgctgccacgggagtactacagtgatccgtctggagctgctagggtacccaaagagcctcccctctatcgggacccaggagtcagccggccggtccccagctacggagtgcttggcagcagaacgtcatgggatccaatgcaaggccggtcacctgccctgcaggacgccggtcacctgtaccgggatcctggaggtaaaatgatccctcaggggcggcagacacagagcagggctgcatctcccgggcggtatggacgggagcagcccgacaccaggtatggggcggaggtgcctgcctaccccctcagccaggtcttcagcgacatcagcgaaagacccattgaccctgcccctgccagacaggtggccccgacgtgcctggttgtggaccccagttcagctgctgcccccgaaggcagcacaggggtggccccaggggccctgaatcgtggctacgggcctgcccgggaaagcatcccatccaagatggcttacgagacttacgaagctgacctgtccaccttccagggtcctggtggcaagaggaccgtgctccctgagttcctggcctttctgcgggcggaggggctggcagaggccacgctgggagccctactgcagcagggctttgactccccggccgtcctggctaccctggaggacgcggatatcaagtctgtcgcacccaacctgggccaggcccgtgttctgagccgcctggccaatagctgcaggaccgaaatgcagctgcggaggcaggaccgggggggcccgctgccccgggcgcggtccagcagcttcagccaccgaagcgaactgctccatggtgacttggcttctctgggcgctgcggctcctctgcagacagcatccccccgagctggagacccggctcgccgtccctccagcgcaccatctcagcacctcctggagacggcagccacctattctgcccctggcgtgggcacccatgccccacacttcccctccaactccgggtacagctctcccaccccttgcgccctgacagcgcgtctgagccccacgcaccccctgcaggcaggggtggccttgactaacccgggcccctcaaacccccttcacccaggccccagaacagcttactccacggcatacacggtgcccatggagctgctaaagagggagcgcaacgtggccgcctctccgctgcccagccctcacggcagcccccaggtcttgcggaagccaggtgcacccctggggccatccaccctgccgccggccagccagagcctccacacgcctcactcaccgtacgagaaggtggcccggcgcacaggggcacccatcatcgtgtccaccatgcttgcaccagaaccaagtatccgcccccagatcatgaacggccccctgcacccccgccccctggtggcgctgctggacggccgcgactgcactgtggagatgcccatcctgaaggacctggccactgtggccttctgtgacgcgcagtcgacgcaggaaatccacgagaaggttctaaacgaagccgtgggcgccatgatgtaccacaccatcaccttcaacagggaggacctggagaagttcaaggccctgagagtgatcgtgcggataggcagtggctatgacaacgtgaacatcaaggctgccggcgagctcggaattgccgtgtgcaacatcccgtctgcagccgtggaagagacagcggactctaccatctgccacatcctcaacctgtaccggaggaacacgtggctgtaccaggcactgcgggaaggcacgcgggttcagagcgtggagcagatccgcgaggtggcctcgggagcggcccgcatccgtggggagacgctgggcctcattggctttggtcgcacggggcaggcggttgcagttcgagccaaggcctttggattcagcgtcatattttatgacccctacttgcaggatgggatcgagcggtccctgggcgtgcagagggtctacaccctgcaggatttgctgtatcagagcgactgcgtctccttgcactgcaatctcaacgaacataaccaccacctcatcaatgactttaccataaagcagatgaggcagggagcattccttgtgaacgcagcccgtggcggcctggtggacgagaaagccttagcacaagccctcaaggagggcaggatacgaggggcagccctcgacgtgcatgagtcagagcccttcagctttgctcagggtccgttgaaagatgccccgaatctcatctgcactcctcacactgcctggtacagtgagcaggcgtcactggagatgagggaggcagctgccaccgagatccgccgagccatcacaggtcgcatcccagaaagcttaagaaattgtgtgaacaaggaattctttgtcacatcagcgccttggtcagtaatagaccagcaagcaattcatcctgagctcaatggtgccacatacagatatccgccaggcatcgtgggtgtggctccaggaggacttcctgcagccatggaagggatcatccctggaggcatcccagtgactcacaacctcccgacagtggcacatccttcccaagcgccctctcccaaccagcccacaaaacacggggacaatcgagagcaccccaacgagcaatagcagagaatgccagaaggtaatcactcagatacacttgggaccaagagacagtgaaaaatagatgaactaagagaaaaagaatcggatggtctttgtaactgattctggacatatgcatcattgatgttgcagtgttgaaactacaagagctagaaaactgaagatgtcgtctgcttacggaagcgctgaaagactaggatgtgatttattaacgaccaacttctgttattgtgtgttaagtttttcatctgtgcatcaaatcacaaaaagaataaatagagctttttcctttatcagtcccttgggcacagcaggtcctgaacaccctgctctacaatgttgcatcaagagttcaaacaacaaaataaaaaatattaagaggaaatccccatcctgtgacttgagtcccttaagtctacaggggctgggtgacctctttttgctaataggaaaatcacattactacaaaatggggaaaaaactgtttgcctgtggtagacacctgcacgcataggattgaagacagtacaggctgctgtacagagaagcgcctctcacatctgaactgcatactgagcgggcaagtcggttgtaagttcagtaaaaccctctgatgatgcaaaaaaaaaaaaaaagtattaagtttcacaagctgtttgtactcaaatatattttctcagtttcag

SEQ ID NO: 76 - protein, 985 aa, Homo sapiens
MPVPSRHINIGRSQSWDAAGWYEGPWENAESLRPLGRRSSLTYGTAEGTWFEPNHRPQDAALPVAAEPYLYREAVYNSVAARKGSTPDFTFYDSRQAVMSGRSPLLPREYYSDPSGAARVPKEPPLYRDPGVSRPVPSYGVLGSRTSWDPMQGRSPALQDAGHLYRDPGGKMIPQGRQTQSRAASPGRYGREQPDTRYGAEVPAYPLSQVFSDISERPIDPAPARQVAPTCLVVDPSSAAAPEGSTGVAPGALNRGYGPARESIPSKMAYETYEADLSTFQGPGGKRTVLPEFLAFLRAEGLAEATLGALLQQGFDSPAVLATLEDADIKSVAPNLGQARVLSRLANSCRTEMQLRRQDRGGPLPRARSSSFSHRSELLHGDLASLGAAAPLQTASPRAGDPARRPSSAPSQHLLETAATYSAPGVGTHAPHFPSNSGYSSPTPCALTARLSPTHPLQAGVALTNPGPSNPLHPGPRTAYSTAYTVPMELLKRERNVAASPLPSPHGSPQVLRKPGAPLGPSTLPPASQSLHTPHSPYEKVARRTGAPIIVSTMLAPEPSIRPQIMNGPLHPRPLVALLDGRDCTVEMPILKDLATVAFCDAQSTQEIHEKVLNEAVGAMMYHTITFNREDLEKFKALRVIVRIGSGYDNVNIKAAGELGIAVCNIPSAAVEETADSTICHILNLYRRNTWLYQALREGTRVQSVEQIREVASGAARIRGETLGLIGFGRTGQAVAVRAKAFGFSVIFYDPYLQDGIERSLGVQRVYTLQDLLYQSDCVSLHCNLNEHNHHLINDFTIKQMRQGAFLVNAARGGLVDEKALAQALKEGRIRGAALDVHESEPFSFAQGPLKDAPNLICTPHTAWYSEQASLEMREAAATEIRRAITGRIPESLRNCVNKEFFVTSAPWSVIDQQAIHPELNGATYRYPPGIVGVAPGGLPAAMEGIIPGGIPVTHNLPTVAHPSQAPSPNQPTKHGDNREHPNEQ

SEQ ID NO: 77 - DNA, 2312 bp, Homo sapiens
tccagtgacggagccgcccggccgacagccccgagacgacagcccggcgcgtcccggtccccacctccgaccaccgccagcgctccaggccccgcgctccccgctcgccgccaccgcgccctccgctccgcccgcagtgccaaccatgaccgccgccagtatgggccccgtccgcgtcgccttcgtggtcctcctcgccctctgcagccggccggccgtcggccagaactgcagcgggccgtgccggtgcccggacgagccggcgccgcgctgcccggcgggcgtgagcctcgtgctggacggctgcggctgctgccgcgtctgcgccaagcagctgggcgagctgtgcaccgagcgcgacccctgcgacccgcacaagggcctcttctgtgacttcggctccccggccaaccgcaagatcggcgtgtgcaccgccaaagatggtgctccctgcatcttcggtggtacggtgtaccgcagcggagagtccttccagagcagctgcaagtaccagtgcacgtgcctggacggggcggtgggctgcatgcccctgtgcagcatggacgttcgtctgcccagccctgactgccccttcccgaggagggtcaagctgcccgggaaatgctgcgaggagtgggtgtgtgacgagcccaaggaccaaaccgtggttgggcctgccctcgcggcttaccgactggaagacacgtttggcccagacccaactatgattagagccaactgcctggtccagaccacagagtggagcgcctgttccaagacctgtgggatgggcatctccacccgggttaccaatgacaacgcctcctgcaggctagagaagcagagccgcctgtgcatggtcaggccttgcgaagctgacctggaagagaacattaagaagggcaaaaagtgcatccgtactcccaaaatctccaagcctatcaagtttgagctttctggctgcaccagcatgaagacataccgagctaaattctgtggagtatgtaccgacggccgatgctgcaccccccacagaaccaccaccctgccggtggagttcaagtgccctgacggcgaggtcatgaagaagaacatgatgttcatcaagacctgtgcctgccattacaactgtcccggagacaatgacatctttgaatcgctgtactacaggaagatgtacggagacatggcatgaagccagagagtgagagacattaactcattagactggaacttgaactgattcacatctcatttttccgtaaaaatgatttcagtagcacaagttatttaaatctgtttttctaactgggggaaaagattcccacccaattcaaaacattgtgccatgtcaaacaaatagtctatcttccccagacactggtttgaagaatgttaagacttgacagtggaactacattagtacacagcaccagaatgtatattaaggtgtggctttaggagcagtgggagggtaccagcagaaaggttagtatcatcagatagctcttatacgagtaatatgcctgctatttgaagtgtaattgagaaggaaaattttagcgtgctcactgacctgcctgtagccccagtgacagctaggatgtgcattctccagccatcaagagactgagtcaagttgttccttaagtcagaacagcagactcagctctgacattctgattcgaatgacactgttcaggaatcggaatcctgtcgattagactggacagcttgtggcaagtgaatttcctgtaacaagccagattttttaaaatttatattgtaaatattgtgtgtgtgtgtgtgtgtgtatatatatatatatatgtacagttatctaagttaatttaaagttgtttgtgcctttttatttttgtttttaatgctttgatatttcaatgttagcctcaatttctgaacaccataggtagaatgtaaagcttgtctgatcgttcaaagcatgaaatggatacttatatggaaattctctcagatagaatgacagtccgtcaaaacagattgtttgcaaaggggaggcatcagtgtccttggcaggctgatttctaggtaggaaatgtggtagctcacgctcacttttaatgaacaaatggcctttattaaaaactgagtgactctatatagctgatcagttttttcacctggaagcatttgtttctactttgatatgactgtttttcggacagtttatttgttgagagtgtgaccaaaagttacatgtttgcacctttctagttgaaaataaagtatattttttctaaaaaaaaaaaaaaacgacagcaacggaattc

SEQ ID NO: 78 - protein, 349 aa, Homo sapiens
MTAASMGPVRVAFVVLLALCSRPAVGQNCSGPCRCPDEPAPRCPAGVSLVLDGCGCCRVCAKQLGELCTERDPCDPHKGLFCDFGSPANRKIGVCTAKDGAPCIFGGTVYRSGESFQSSCKYQCTCLDGAVGCMPLCSMDVRLPSPDCPFPRRVKLPGKCCEEWVCDEPKDQTVVGPALAAYRLEDTFGPDPTMIRANCLVQTTEWSACSKTCGMGISTRVTNDNASCRLEKQSRLCMVRPCEADLEENIKKGKKCIRTPKISKPIKFELSGCTSMKTYRAKFCGVCTDGRCCTPHRTTTLPVEFKCPDGEVMKKNMMFIKTCACHYNCPGDNDIFESLYYRKMYGDMA

SEQ ID NO: 79 - DNA, 6232 bp, Homo sapiens
ctgccagatcagtttgtcaccacccaggctcccttgcctttggctgggtgcaacttccattttaggtgttggatctgagggggaaaaaaaagagagagggagagagagagaaagaagagcaggaaagatcccgaaaggaggaagaggtggcgaaaaatcaactgccctgctggatttgtctttctcagcaccttggcgaagccttgggtttctttcttaaaggactgatttttagaactccacatttgaggtgtgtggcttttgaagaaaatgtatgtactgacgggaaaaggaagataagcaagtcgaatttttgtcttacgctctctccttcctgcttcctccttgctgtggtggctgggatgctccttccatgattttttgaatctagactgggctgttctctgtgttaaaccaatcagttgcgaccttctcttaacagtgtgaagtgagggggtctctctccctccttctccttcctctgtgattcaccttcctttttaccctgccctgcggcggctccgccccttaccttcatggacgactcagaggtggagtcgaccgccagcatcttggcctctgtgaaggaacaagaggcccagtttgagaagctgacccgggcgctggaggaggaacggcgccacgtctcggcgcagctggaacgcgtccgggtctcaccacaagatgccaacccactcatggccaacggcacactcacccgccggcatcagaacggccggtttgtgggcgatgctgaccttgaaagacagaaattttcagatttgaaactcaacggaccccaggatcacagtcaccttctatatagcaccatccccaggatgcaggagccggggcagattgtggagacctacacggaggaggatcctgagggagccatgtctgtagtctctgtggagacctcagatgatgggaccactcggcgcacagagaccacggtcaagaaagtagtgaagactgtgacaacacggacagtacagccagtcgctatgggaccagacgggttgcctgtggatgcttcatcagtttctaacaactatatccagactttgggtcgtgatttccgcaagaatggcaatgggggacctggtccctatgtggggcaagctggcactgctacccttcctaggaacttccactaccctcctgatggttatagtcgccactatgaagatggttatccaggtggcagtgataactatggcagtctgtcccgggtgacccgcattgaggagcggtataggcccagcatggaaggctaccgggcacctagtagacaggatgtgtatgggccccaaccccaggttcgggtaggtgggagcagcgtggatctgcatcgctttcatccagagccttatgggctagaggatgaccagcgtagtatgggctatgatgacctggattatggtatgatgtctgattatggcactgcccgtcggactgggacaccctctgaccctcgtcggcgcctcaggagctatgaagacatgattggtgaggaggtgccatcggatcaatactactgggctcctttggcccagcatgagcgaggaagtttagcaagcttggatagcctgcgcaaaggagggcctccacctcctaattggagacagccagagctgccagaggtgatcgccatgcttggattccgcttggatgctgtcaagtccaatgcagctgcatacctgcaacacttatgctaccgcaatgacaaggtgaagactgacgtgcggaagctcaagggcatcccagtactggtgggattgttagaccatcccaaaaaggaagtgcaccttggagcctgtggagctctcaagaatatctcttttggacgtgaccaggataacaagattgccataaaaaactgtgatggtgtgcctgcccttgtgcgattgcttcgaaaggctcgtgatatggaccttactgaagttattaccggaaccctgtggaatctttcatcccatgactcaatcaaaatggagattgtggaccatgcactgcatgccttgacagatgaagtgatcattcctcattctggttgggagcgggaacctaatgaagactgtaagccacgccatattgagtgggaatcggtgctcaccaacacagctggctgccttaggaatgtaagctcagagaggagtgaagctcgccggaaacttcgggaatgtgatggtttagttgatgccctcattttcattgttcaggctgagattgggcagaaggattcagacagcaagcttgtagagaactgtgtttgccttcttcggaacttatcatatcaagttcaccgggagatcccacaggcagagcgttaccaagaggcagctcccaatgttgccaacaatactgggccacatgctgccagttgctttggggccaagaagggcaaagggaaaaaacctatagaggatccagcaaacgatacagtggatttccctaaaagaacgagtccagctcgaggctatgagctcttatttcagccagaggtggttcggatatacatctcacttcttaaggagagcaagactcctgccatcctagaagcctcagctggagctatccagaacttgtgtgctgggcgctggacgtatggtcgatacatccgctctgctctgcgtcaagagaaggctctttctgccatagctgacctcctgactaatgaacatgaacgggtggtgaaagctgcatctggagcactgagaaacctggctgtggatgctcgcaacaaagaattaattggtaaacatgctattcctaacttggtaaagaatctgccaggaggacagcagaactcctcttggaatttctctgaggacactgtcatctctattttgaacactatcaacgaggttatcgctgagaacttggaggctgccaaaaagcttcgagagacacagggtattgagaagctggtgttgatcaacaaatcagggaaccgctcagaaaaagaagttcgagcagcagcacttgtattacagacaatctggggatataaggaactgcggaagccactggaaaaagaaggatggaagaaatcagactttcaggtgaatctaaacaatgcttcccgaagccagagcagtcattcatatgatgatagtactctccctctcattgaccggaaccaaaaatcagataacaactattccacaccaaatgagagaggagaccacaatagaacactggatcgatcgggggatctaggcgacatggagccattgaagggaacaacacccttgatgcaggacgaggggcaggaatctctggaggaagagttggatgtgttggttttggatgatgaggggggccaagtgtcttacccctccatgcagaagatttagcaccactatctccgttccatctgggcttatatgtacttttattttttggtggtgaaattgactgatgattttcctttttcttcgctggactattgtgccaactgccaggctgcctcctgcccttacagccctaagtggctgccttctttccatcaactcccaacttcttcctgtgaagtttaattgtctcaacgcctccccctcccccattccctccatttttctcccaagaaacctgactcaattatttgcatattttgagaaactgctgcagattagttctttttgccagttttccctggaactcctggccttttgtggaggggagggatggagagaataggaatcttcactagaagccgtgggaagaattggaagttacatgctgtatatgcaatgtccagcagtctgataaactgacgattcttaatcaagatttttttcctgatggggaagggacttttattttcttttagagaggggaaagtgtgagctcttcccttattcctaatggctatttttgaagcaaagaaggccagcaacattggcacatgccacctggcaaaggacccttgagtaagtgaaggtctcctaaaactgggattaagaaaccttgctctcctcatctccaaggcagggaccatcaagaacctacagactccatctcttctgcaagcctcatgccaaccctgggctattgctgctgccccttaaacacaggctgtccttaacccacctctcctgccctgtgatatgtctgctgagttggcctggccatttccaagaggctgtagaaaggggagaatgtcaaggaagacttttggtagagaaggagcagaaagatgtgtttttgggaagaagaagacctctaggaggagctagtaggaatgtacatgaagcaattagtctgaaactggcttccccactcccccgtttctccttttcctatccttataggcctgtcccttgcctctgccctggattggttggcaaactataggacttgatgtacataactcctgtcccttttcccttacaaggtggggattgcccctggctttgcctcttctttgtgcctttggcctggggtgcatctcctcccgcccttccatgtgcctttctttgcctctgcagtctcatttctcataattttgcaaattatattttgttgctttcttacctactattggccctaaatagcagaaagaagagaagtgaccgagagaacctcagattcttcattgaggattggtatagccatgatttcagtcatagcaagcttttgctcaacagcatatgggtgggatttggcaaaaatcctattctgatgaatctcaaagtaaggctggtaagagaagtgagtggtgtgactcttactccttaggtgcccagaatttaccatcatctctgaaggagttacagggaagtggtctccccaattctcccctccctccagtattgccccctctcactttagcatatattaattagcaggttgggctagagaaatcagctgctatgcgggttgattattattattatttctaatccttttccttatttgccttctactccccttaatctaatctaaaagctctgttccatgcaactggagttccttatccctctcttccccttcccttatatattgaggctatggggtaggagaaaagtgcacaacccaccaccccctctactcgtgcattaaaatttcttatttacccttttcccccttcccatttcttcccactttcatctaccttttctggcaaaaaggagccttttgctctctgtgaccctaagagcacactgcacagggaaaattgccccatccagacctggctccactcttgatctctcttgtcctcttctgctcttttcctggtgctcttttttctcggtggggtgtgggtaatagaacagccgtgggcttttggggacctttaacttttttttctctcttttgtttataaaaaacactaaacattcaattccagagaacccaaaatcccaccttcccaccgaacactactaaggggcttgtgttctgctccataccttttctcttttctttctgtcttgttaatgcttttaaaaacaaatgagttttttatataaataaagtttttaaagtgtgtatgtggggggtctgtgtcatttcttcacttcaagctgttatttcttccctgctttgcatctttgttacttccttatgtatcagtgtcctttccagagcaaccagaaggaggttataccaggatttattttgagctcagccccaactctttatcaagcaacattcttgttaactatatgtgaaacattttttcttctgaagattcttaaaaattgaatgtggctgaagttgaacatgggagcttattgctaatttagagataggaaactgaagcataaagaattaatgacttactttaattactggaattcttctgcaacatttgacaaaactaaccttgaataaggcccactgtaatacgtagctctcttaaatataacacttaggactagaagattagaaactaccaatcccaactacgtaataggaaaatgtaggatcaaaaggcccatgtatataagtactgaccactgggccataatgttgcttctcaggctatatgcagtcctttagtcagaagtcaataggcctatttattaatattttacagaccatattacctggattaccagggactatctttgctgcagagatcaagggttaagatctatgggaagatacttatttttctgaggtccttatgtcctgtcatataattaaagactcaagagaatttatgtgaaatgctttctgtatgccccaatctttagattaaaattatatacctgctcct

SEQ ID NO: 80 - protein, 941 aa, Homo sapiens
MDDSEVESTASILASVKEQEAQFEKLTRALEEERRHVSAQLERVRVSPQDANPLMANGTLTRRHQNGRFVGDADLERQKFSDLKLNGPQDHSHLLYSTIPRMQEPGQIVETYTEEDPEGAMSVVSVETSDDGTTRRTETTVKKVVKTVTTRTVQPVAMGPDGLPVDASSVSNNYIQTLGRDFRKNGNGGPGPYVGQAGTATLPRNFHYPPDGYSRHYEDGYPGGSDNYGSLSRVTRIEERYRPSMEGYRAPSRQDVYGPQPQVRVGGSSVDLHRFHPEPYGLEDDQRSMGYDDLDYGMMSDYGTARRTGTPSDPRRRLRSYEDMIGEEVPSDQYYWAPLAQHERGSLASLDSLRKGGPPPPNWRQPELPEVIAMLGFRLDAVKSNAAAYLQHLCYRNDKVKTDVRKLKGIPVLVGLLDHPKKEVHLGACGALKNISFGRDQDNKIAIKNCDGVPALVRLLRKARDMDLTEVITGTLWNLSSHDSIKMEIVDHALHALTDEVIIPHSGWEREPNEDCKPRHIEWESVLTNTAGCLRNVSSERSEARRKLRECDGLVDALIFIVQAEIGQKDSDSKLVENCVCLLRNLSYQVHREIPQAERYQEAAPNVANNTGPHAASCFGAKKGKGKKPIEDPANDTVDFPKRTSPARGYELLFQPEVVRIYISLLKESKTPAILEASAGAIQNLCAGRWTYGRYIRSALRQEKALSAIADLLTNEHERVVKAASGALRNLAVDARNKELIGKHAIPNLVKNLPGGQQNSSWNFSEDTVISILNTINEVIAENLEAAKKLRETQGIEKLVLINKSGNRSEKEVRAAALVLQTIWGYKELRKPLEKEGWKKSDFQVNLNNASRSQSSHSYDDSTLPLIDRNQKSDNNYSTPNERGDHNRTLDRSGDLGDMEPLKGTTPLMQDEGQESLEEELDVLVLDDEGGQVSYPSMQKI

SEQ ID NO: 81 - DNA, 2059 bp, Homo sapiens
gtggatatccccgagtcaccgcgtccctctcctgcagctcccgcgtcgctgggaggagcgagggagcgagcgggaaggggtctagctggcctttgctcggccctccccagcgcccggctttgaacccgccctgcactgctgtctgggcgggtccggggactcagcactcgacccaaaggtgcaggcgcgcgagcacaacccatggctgcgctgggctgcgcgaggctgaggtgggcgctgcgaggggccggccgtggcctctgcccccacggggccagagccaaggccgcgatccctgccgccctcccctcggacaaggccaccggagctcccggagccgggcctggtgtccggcggcggcaacggagcttagaggagattccacgtctaggacagctgcgcttcttctttcagctgttcgttcaaggctatgccctgcaactgcaccagttacaggtgctttacaaggccaagtacggtccaatgtggatgtcctacttagggcctcagatgcacgtgaacctggccagtgccccgctcttggagcaagtgatgcggcaagagggaaagtacccagtacggaacgacatggagctatggaaggagcaccgggaccagcacgacctgacctatgggccgttcaccacggaaggacaccactggtaccagctgcgccaggctctgaaccagcggttgctgaagccagcggaagcagcgctctatacggatgctttcaatgaggtgattgatgactttatgactcgactggaccagctgcgggcagagagtgcttcggggaaccaggtgtcggacatggctcaactcttctactactttgccttggaagctatttgctacatcctgttcgagaaacgcattggctgcctgcagcgatccatccccgaggacaccgtgaccttcgtcagatccatcgggttaatgttccagaactcactctatgccaccttcctccccaagtggactcgccccgtgctgcctttctggaagcgatacctggatggttggaatgccatcttttcctttgggaagaagctgattgatgagaagctcgaagatatggaggcccaactgcaggcagcagggccagatggcatccaggtgtctggctacctgcacttcttactggccagtggacagctcagtcctcgggaggccatgggcagcctgcctgagctgctcatggctggagtggacacgacatccaacacgctgacatgggccctgtaccacctctcaaaggaccctgagatccaggaggccttgcacgaggaagtggtgggtgtggtgccagccgggcaagtgccccagcacaaggactttgcccacatgccgttgctcaaagctgtgcttaaggagactctgcgtctctaccctgtggtccccacaaactcccggatcatagaaaaggaaattgaagttgatggcttcctcttccccaagaacacccagtttgtgttctgccactatgtggtgtcccgggaccccactgccttctctgagcctgaaagcttccagccccaccgctggctgagaaacagccagcctgctacccccaggatccagcacccatttggctctgtgccctttggctatggggtccgggcctgcctgggccgcaggattgcagagctggagatgcagctactcctcgcaaggctgatccagaagtacaaggtggtcctggccccggagacgggggagttgaagagtgtggcccgcattgtcctggttcccaataagaaagtgggcctgcagttcctgcagagacagtgctgagctgagtctccgccttgctggggcttgtcctagaggctccagctctggcacagtggttcctggctgctgccatgtctcagatgaggagggagagaaggaggccgccagactcgagaggtgggaggaactccttgcacacaccctgagcttttgccacttctatcatttttgagcaactccctctcagctaaaaggccacccctttatcgcattgctgtccttgggtagaatataaaataaagggacttttatttcttattgg

SEQ ID NO: 82 - protein, 531 aa, Homo sapiens
MAALGCARLRWALRGAGRGLCPHGARAKAAIPAALPSDKATGAPGAGPGVRRRQRSLEEIPRLGQLRFFFQLFVQGYALQLHQLQVLYKAKYGPMWMSYLGPQMHVNLASAPLLEQVMRQEGKYPVRNDMELWKEHRDQHDLTYGPFTTEGHHWYQLRQALNQRLLKPAEAALYTDAFNEVIDDFMTRLDQLRAESASGNQVSDMAQLFYYFALEAICYILFEKRIGCLQRSIPEDTVTFVRSIGLMFQNSLYATFLPKWTRPVLPFWKRYLDGWNAIFSFGKKLIDEKLEDMEAQLQAAGPDGIQVSGYLHFLLASGQLSPREAMGSLPELLMAGVDTTSNTLTWALYHLSKDPEIQEALHEEVVGVVPAGQVPQHKDFAHMPLLKAVLKETLRLYPVVPTNSRIIEKEIEVDGFLFPKNTQFVFCHYVVSRDPTAFSEPESFQPHRWLRNSQPATPRIQHPFGSVPFGYGVRACLGRRIAELEMQLLLARLIQKYKVVLAPETGELKSVARIVLVPNKKVGLQFLQRQC

SEQ ID NO: 83 - DNA, 1887 bp, Homo sapiens
gcgcacggcctgtccgctgcacaccagcttgttggcgtcttcgtcgccgcgctcgccccgggctactcctgcgcgccacaatgagctcccgcatcgccagggcgctcgccttagtcgtcacccttctccacttgaccaggctggcgctctccacctgccccgctgcctgccactgccccctggaggcgcccaagtgcgcgccgggagtcgggctggtccgggacggctgcggctgctgtaaggtctgcgccaagcagctcaacgaggactgcagcaaaacgcagccctgcgaccacaccaaggggctggaatgcaacttcggcgccagctccaccgctctgaaggggatctgcagagctcagtcagagggcagaccctgtgaatataactccagaatctaccaaaacggggaaagtttccagcccaactgtaaacatcagtgcacatgtattgatggcgccgtgggctgcattcctctgtgtccccaagaactatctctccccaacttgggctgtcccaaccctcggctggtcaaagttaccgggcagtgctgcgaggagtgggtctgtgacgaggatagtatcaaggaccccatggaggaccaggacggcctccttggtaaggagctgggattcgatgcctccgaggtggagttgacgagaaacaatgaattgattgcagttggaaaaggcagctcactgaagcggatccctgtttttggaatggagcctcgcatccgatacaaccctttacaaggccagaaatgtattgttcaaacaacttcatggtcccagtgctcaaagacctgtggaactggtatctccacacgagttaccaatgacaaccctgagtgccgccttgtgaaagaaacccggatttgtgaggtgcggccttgtggacagccagtgtacagcagcctgaaaaagggcaagaaatgcagcaagaccaagaaatcccccgaaccagtcaggtttacttacgctggatgtttgagtgtgaagaaataccggcccaagtactgcggttcctgcgtggacggccgatgctgcacgccccagctgaccaggactgtgaagatgcggttccgctgcgaagatggggagacattttccaagaacgtcatgatgatccagtcctgcaaatgcaactacaactgcccgcatgccaatgaagcagcgtttcccttctacaggctgttcaatgacattcacaaatttagggactaaatgctacctgggtttccagggcacacctagacaaacaagggagaagagtgtcagaatcagaatcatggagaaaatgggcgggggtggtgtgggtgatgggactcattgtagaaaggaagccttgctcattcttgaggagcattaaggtatttcgaaactgccaagggtgctggtgcggatggacactaatgcagccacgattggagaatactttgcttcatagtattggagcacatgttactgcttcattttggagcttgtggagttgatgactttctgttttctgtttgtaaattatttgctaagcatattttctctaggcttttttccttttggggttctacagtcgtaaaagagataataagattagttggacagtttaaagcttttattcgtcctttgacaaaagtaaatgggagggcattccatcccttcctgaagggggacactccatgagtgtctgtgagaggcagctatctgcactctaaactgcaaacagaaatcaggtgttttaagactgaatgttttatttatcaaaatgtagcttttggggagggaggggaaatgtaatactggaataatttgtaaatgattttaattttatattcagtgaaaagattttatttatggaattaaccatttaataaagaaatatttacct

SEQ ID NO: 84 - protein, 381 aa, Homo sapiens
MSSRIARALALVVTLLHLTRLALSTCPAACHCPLEAPKCAPGVGLVRDGCGCCKVCAKQLNEDCSKTQPCDHTKGLECNFGASSTALKGICRAQSEGRPCEYNSRIYQNGESFQPNCKHQCTCIDGAVGCIPLCPQELSLPNLGCPNPRLVKVTGQCCEEWVCDEDSIKDPMEDQDGLLGKELGFDASEVELTRNNELIAVGKGSSLKRIPVFGMEPRIRYNPLQGQKCIVQTTSWSQCSKTCGTGISTRVTNDNPECRLVKETRICEVRPCGQPVYSSLKKGKKCSKTKKSPEPVRFTYAGCLSVKKYRPKYCGSCVDGRCCTPQLTRTVKMRFRCEDGETFSKNVMMIQSCKCNYNCPHANEAAFPFYRLFNDIHKFRD

SEQ ID NO: 85 - DNA, 4046 bp, Homo sapiens
ggcggggctcggtccttgggggggctttgagctctccagactgtgcccttaccgccttccccgccacacccgctctgtcttcccactgtcccccccatcccgggcagggcccagtgggattgagggggctgggtcccccaggacacgggcccagaagagccccacgggcttcctgcatcttccaccgcaccatacctggagccctccgaggggtgtcaggggaaacaggccaccgccaaagccatggcccgccgccgagagcccaggccccacccgcacctcctcacccatccagcctgacccacgcggcctctcctcctccttgccgctgtgtggggcagtcccctgtccgccccaaaacccggccttggtccctggccaggctgagagaattgggcagggagagggcggaagggctggcgatcgcttggagtcattaacgtgatcccagctgactccggtcggcctcaacccaggggtggcgcaggcaccttgcaagcctcgagctgtagccaccctcaggcctgggaagaggcctgggccgacctcacacctcagcccttgcacccggccgggctcagttcaggcctgggcaccgagcttcaccctgggtgggtctcctcaggtggagtctgcagagtggacccagccaagggtcagggtcagcactgggtcagcgactccaatcttccagtggccagcacaccctagacaccccgaggagggagggctcctttctagcctgcccccccacccccacttcacccctccccagcttcccaaacttctgtctgcccaaatgggctctgaccgtgctctgtcggcccgagacatttggaagtcctgggggatgctggcaaatctcagctgttgctgaggagggggctgggaccccttcccatcccaaccttgagccccaggagataccgcgcccacacccaatcttgggacactccctatctggttggaagagagtaaccagtttccagagagccagagagtgagagagagaaagagagtgagagagagagagaaagagagagagagatgctgttgaatcagaaacagatcaacagcccaaagattttcctgtccctggagtgccagccccaggaagctccagggctgagtggtcaggagccagtttctccagcccctcctccccacaacccctagtggggaggggcagctgtccatttgcccaaagtattaatgcaactgaagctgtgatatttccaacgactgtaggaggaaaaattaaggggagagaggaaaacaaaaccaaccaacccctaaaatcattttcttattgtacataacgacctcattctcctgtatatgcggaagatataaccttatatttggtaagtgtttcttgtgctattttatcacgtgacctgtttataaaaatatatattaaaaaagttgtaaaaacatgtgtctgagttgtttttaggtccccagacagcggtgtaggtgggcatatctgccctgcgcatcccaggtctcgggattctcctgtacctcttatcagatttattctttcttgcaacaaaggggtagaggctggatgccgacatggtagaatggaaacagcagtgactacatggaaggcagaggacctcccattcctgtgcagccatggagaagatgtcccgtgtgaccacagccctgggtggcagcgtgctgacaggccgcaccatgcactgccacctggatgctcccgccaatgccatcagtgtgtgccgcgacgcagcccaggtggtcgtggcaggccgtagcatcttcaagatctatgccatcgaggaggaacagttcgtggaaaagctgaacctgcgtgtggggcgcaagccttcgcttaacctgagctgtgctgacgtggtctggcaccagatggatgagaacctgctggccacagcagccaccaatggcgtggtggtcacgtggaacctgggccggccatcccgcaacaagcaggaccagctgttcacagaacacaagcgcacggtaaacaaagtctgcttccaccccaccgaagcccacgtgctgctcagtggctcccaggatggcttcatgaagtgctttgacctccgcagaaaggactctgtcagcaccttctcgggccagtcggagagcgtgcgggacgtgcagttcagtatccgggactacttcaccttcgcctccacctttgagaacggcaatgtgcagctctgggacatccggcgtcccgaccggtgcgagaggatgttcacagcccacaacggacccgtcttctgctgcgactggcaccccgaggacaggggctggttggccactggagggcgcgacaagatggtgaaggtctgggacatgaccacgcaccgtgccaaggagatgcactgtgtgcagaccatcgcctcggtggcccgtgtgaagtggcggccagagtgccgccaccacctggccacgtgctccatgatggtggaccacaacatctatgtttgggacgtgcgccggcccttcgtgccagctgccatgtttgaggaacaccgagacgtcaccacgggaattgcctggcgccacccccacgacccctccttcctgctgtctggctccaaggacagctcgctgtgccagcacctgttccgcgacgccagccagcccgtcgagcgcgccaaccctgagggcctctgctacggcctcttcggggacctggccttcgccgccaaggagagcctcgtggctgccgagtcggggcgcaagccctacactggcgaccggcgccaccccatcttctttaagcgcaagctggaccctgccgagcccttcgcaggcctcgcctccagtgccctcagtgtctttgagacggagccaggtggcggcggcatgcgctggtttgtggacacagctgagcgttatgcgctggctggccggccactggccgagctctgtgaccacaacgcaaaggtggctcgagagcttggccgcaaccaggtggcgcaaacgtggaccatgctgcggatcatctactgcagccctggcctagtgcccactgcaaacctcaaccacagtgtgggcaagggtggctcctgtggcctcccgctcatgaacagtttcaacctgaaggatatggccccagggttgggcagtgagacgcggctggaccgcagcaaaggagatgcacggagcgacacagttctgctcgactcctcggccacactcatcaccaatgaggataacgaggaaaccgagggcagcgacgtacctgccgactacctgctgggtgacgtggaaggtgaggaggacgagctgtacctgctggatccggaacacgcgcaccccgaggaccctgagtgcgtgctgccgcaggaggcctttccgctgcgccacgagatcgtggacacgcctcccgggcccgagcacctgcaggacaaggccgactccccgcacgtgagcggcagcgaggcggatgtggcctccctggcccccgtggactcctccttctcgctcctgtctgtctcacacgcgctctacgacagccgcctgccgcccgacttcttcggcgtgctggtgcgcgacatgctgcacttctacgctgagcagggcgacgtgcagatggctgtgtctgtgctcatcgtcctgggtgaacgggtgcgcaaggacatcgacgagcagacccaggagcactggtacacttcctacatcgacctgctgcagcgcttccgcctctggaacgtgtccaacgaggtggtcaagctgagcaccagccgcgccgtcagctgcctcaaccaggcctccaccaccctgcacgtcaactgcagccactgcaagcggcccatgagcagccggggctgggtctgcgacaggtgccaccgctgcgccagcatgtgtgccgtctgccaccacgtagtcaagggtctcttcgtgtggtgccagggctgcagccacggcggccacctgcagcacatcatgaagtggctggaaggcagctcccactgtcccgcaggctgcggccacctctgcgagtactcctgacggggcatctgctgggcttgcccgggcggccg

SEQ ID NO: 86 - protein, 790 aa, Homo sapiens
MEKMSRVTTALGGSVLTGRTMHCHLDAPANAISVCRDAAQVVVAGRSIFKIYAIEEEQFVEKLNLRVGRKPSLNLSCADVVWHQMDENLLATAATNGVVVTWNLGRPSRNKQDQLFTEHKRTVNKVCFHPTEAHVLLSGSQDGFMKCFDLRRKDSVSTFSGQSESVRDVQFSIRDYFTFASTFENGNVQLWDIRRPDRCERMFTAHNGPVFCCDWHPEDRGWLATGGRDKMVKVWDMTTHRAKEMHCVQTIASVARVKWRPECRHHLATCSMMVDHNIYVWDVRRPFVPAAMFEEHRDVTTGIAWRHPHDPSFLLSGSKDSSLCQHLFRDASQPVERANPEGLCYGLFGDLAFAAKESLVAAESGRKPYTGDRRHPIFFKRKLDPAEPFAGLASSALSVFETEPGGGGMRWFVDTAERYALAGRPLAELCDHNAKVARELGRNQVAQTWTMLRIIYCSPGLVPTANLNHSVGKGGSCGLPLMNSFNLKDMAPGLGSETRLDRSKGDARSDTVLLDSSATLITNEDNEETEGSDVPADYLLGDVEGEEDELYLLDPEHAHPEDPECVLPQEAFPLRHEIVDTPPGPEHLQDKADSPHVSGSEADVASLAPVDSSFSLLSVSHALYDSRLPPDFFGVLVRDMLHFYAEQGDVQMAVSVLIVLGERVRKDIDEQTQEHWYTSYIDLLQRFRLWNVSNEVVKLSTSRAVSCLNQASTTLHVNCSHCKRPMSSRGWVCDRCHRCASMCAVCHHVVKGLFVWCQGCSHGGHLQHIMKWLEGSSHCPAGCGHLCEYS

SEQ ID NO: 87 - DNA, 811 bp, Homo sapiens
gggacagcgggcagggaaagccgcgggaagggtactccaggcgagaggcggacgcgagtcgtcgtggcaggaaaagtgactagctccccttcgttgtcagccagggacgagaacacagccacgctcccacccggctgccaacgatccctcggcggcgatgtcggccgccggtgcccgaggcctgcgggccacctaccaccggctcctcgataaagtggagctgatgctgcccgagaaattgaggccgttgtacaaccatccagcaggtcccagaacagttttcttctgggctccaattatgaaatgggggttggtgtgtgctggattggctgatatggccagacctgcagaaaaacttagcacagctcaatctgctgttttgatggctacagggtttatttggtcaagatactcacttgtaattattccaaaaaattggagtctgtttgctgttaatttctttgtgggggcagcaggagcctctcagctttttcgtatttggagatataaccaagaactaaaagctaaagcacacaaataaaagagttcctgatcacctgaacaatctagatgtggacaaaaccattgggacctagtttattatttggttattgataaagcaaagctaactgtgtgtttagaaggcactgtaactggtagctagttcttgattcaatagaaaaatgcagcaaacttttaataacagtctctctacatgacttaaggaacttatctatggatattagtaacatttttctaccatttgtccgtaataaaccatacttgctcgtaaaaaaaaaaaaaaaaaaaa

SEQ ID NO: 88 - protein, 127 aa, Homo sapiens [sequence omitted]

SEQ ID NO: 89 - DNA, 1001 bp, Homo sapiens
cgtccgaacacccgatccgaccggcaccatccgcgcgccgggcctccagggcgcagcgttagatggcggtggcagcagcggcgcctgggcccctgaagcccggccgcacccgggccggagctcgcctcatactctccttcttagactaaccagaacatccaaagatcagcaacagtctcctccctcagcccccctccaacaggaggaggcggaggcggaggcgatggcgactcctccctctcctcgtcctggataccctccccgccaaccctttctcgcgagatgacgaccaccctggggactgaggctgccagggacgagaacacagccacgctcccacccggctgccaacgatccctcggcggcgatgtcggccgccggtgcccgaggcctgcgggccacctaccaccggctcctcgataaagtggagctgatgctgcccgagaaattgaggccgttgtacaaccatccagcaggtcccagaacagtttttttctgggctccaattatgaaatgggggttggtgtgtgctggattggctgatatggccagacctgcagaaaaacttagcacagctcaatctgctgttttgatggctacagggtttatttggtcaagatactcacttgtaattattccaaaaaattggagtctgtttgctgttaatttctttgtgggggcagcaggagcctctcagctttttcgtatttggagatataaccaagaactaaaagctaaagcacacaaataaaagagttcctgatcacctgaacaatctagatgtggacaaaaccattgggacctagtttattatttggttattgataaagcaaagctaactgtgtgtttagaaggcactgtaactggtagctagttcttgattcaatagaaaaatgcagcaaacttttaataacagtctctctacatgacttaaggaacttatctatggatattagtaacatttttctaccatttgtccgtaataaaccatacttgctcgt

SEQ ID NO: 90 - DNA, 1113 bp, Homo sapiens
ggggcgacgtttagcgactattgcgcctgcgccagcgccggctgcgagactggggccgtggctgctggtcccgggtgatgctaggcggctccctgggctccaggctgttgcggggtgtaggtgggagtcacggacggttcggggcccgaggtgtccgcgaaggtggcgcagccatggcggcaggggagagcatggctcagcggatggtctgggtggacctggagatgacaggattggacattgagaaggaccagattattgagatggcctgtctgataactgactctgatctcaacattttggctgaaggtcctaacctgattataaaacaaccagatgagttgctggacagcatgtcagattggtgtaaggagcatcacgggaggtctggccttaccaaggcagtgaaggagagtacaattacattgcagcaggcagagtatgaatttctgtcctttgtacgacagcagactcctccagggctctgtccacttgcaggaaattcagttcatgaagataagaagtttcttgacaaatacatgccccagttcatgaaacatcttcattatagaataattgatgtgagcactgttaaagaactgtgcagacgctggtatccagaagaatatgaatttgcaccaaagaaggctgcttctcatagggcacttgatgacattagtgaaagcatcaaagagcttcagttttaccgaaataacatcttcaagaaaaaaatagatgaaaagaagaggaaaattatagaaaatggggaaaatgagaagaccgtgagttgatgccagttatcatgctgccactacatcgttatctggaggcaacttctggtggtttttttttctcacgctgatggcttggcagagcaccttcggttaacttgcatctccagattgattactcaagcagacagcacacgaaatactatttttctcctaatatgctgtttccattatgacacagcagctcctttgtaagtaccaggtcatgtccatcccttggtacatatatgcatttgcttttaaaccatttcttttgtttaaataaataaataagtaaataaagctagttctattgaaatgcaaaaaaaaaaaaaaaaaaaaa

SEQ ID NO: 91 - protein, 237 aa, Homo sapiens
MLGGSLGSRLLRGVGGSHGRFGARGVREGGAAMAAGESMAQRMVWVDLEMTGLDIEKDQIIEMACLITDSDLNILAEGPNLIIKQPDELLDSMSDWCKEHHGRSGLTKAVKESTITLQQAEYEFLSFVRQQTPPGLCPLAGNSVHEDKKFLDKYMPQFMKHLHYRIIDVSTVKELCRRWYPEEYEFAPKKAASHRALDDISESIKELQFYRNNIFKKKIDEKKRKIIENGENEKTVS

SEQ ID NO: 92 - DNA, 6651 bp, Homo sapiens
ggccgagtcgtggcgggagacggtgcagctgtacgaggacgaggtgcgcgagctggaggaggcgctgcggcgcggccaggagagcagactccaggcggaggaagagacgcggctgtgcgcgcaggaggcagaggcgctgcggcgcgaggcgctcgggttggagcagctgcgcgcgcggctggaggacgcgctgctgcggatgcgcgaggagtacgggatacaggccgaggagcggcagagagcgattgactgcctggaggatgagaaggcaaccctcaccttggccatggctgactggctgcgggactatcaggacctcctgcaggtgaagaccggcctcagtctggaggtggcgacctaccgggccttattggaaggagaaagtaatccagagatagtgatctgggctgagcacgttgaaaacatgccgtcagaattcagaaacaaatcctatcactataccgactcactactacagagggaaaatgaatggaatctattttcaaggcagaaagcacctttggcaagtttcaatcacagctcggcactgtattctaacctgtcagggcaccgtggatctcagacgggcacatctattggaggtgatgccagaagaggcttcttgggctcgggatattcttcctcggccactacccagcaggaaaactcatacggaaaagccgtcagcagtcaaaccaacgtcagaactttctctccaacctatggccttttaagaaatactgaggctcaagtgaaaacattccctgacagaccaaaagccggagatacaagggaggtccccgtttacataagtgaagattccacaattgcccgcgagtcgtaccgggatcgccgagacaaggtggcagcaggtgcttcggaaagcacacggtcaaatgagaggaccgtcattctgggaaagaaaacagaagtgaaagccacgagggagcaagaaagaaacagaccagaaaccatccgaacaaagccagaagagaaaatgttcgattctaaagagaaggcttctgaggagagaaacctaagatgggaagaattgacaaagttagataaggaagcgagacagagagaaagccagcagatgaaggagaaggctaaggagaaggactcaccgaaggagaagagtgtgcgagagagagaggtgccgattagtctagaagtatcccaggacagaagagcagaggtgtccccgaaaggtttgcagacgcctgtgaaggatgctggtggtgggaccggtagagaggcagaagcaagagagctacggttcaggttgggcaccagtgatgccactggttctctgcaaggcgattccatgacagaaaccgtagcagaaaacatcgttaccagtatcctgaagcagttcactcagtctccagagacagaagcatctgctgattcttttccagacacaaaagtcacttacgtggacaggaaagagcttcctggggaaaggaaaacaaagactgaaatagttgtggagtctaaactgactgaggatgttgatgtttccgatgaagctggcctggactaccttttaagcaaggatattaaggaagtggggctgaaaggcaagtcagccgagcagatgataggagacatcatcaacctcggcctgaaagggagggaggggagagcaaaggtcgtcaacgtggagatcgtggaggagcccgtgagttatgtcagcggggagaagccggaggagttttccgtcccattcaaagtggaggaggtcgaagatgtgtcgccaggcccctgggggttggttaaggaggaggaaggttatggagaaagcgatgtcacattctcagttaatcagcatcgaaggaccaagcagccccaggagaacacgactcacgtggaagaagtgacagaggcaggtgattcagagggcgagcagagttattttgtgtccactccagatgaacaccccggggggcacgacagagatgacggctcggtgtacgggcagatccacatcgaggaggaatccaccatcaggtactcttggcaggatgaaatcgtgcaggggactcgaaggaggacacagaaggacggtgcagtgggcgagaaggttgtgaagcccttggatgtcccagcgccctctctggagggggacctgggttccactcactggaaagaacaagctagaagcggtgaatttcatgccgaacccacagtcattgaaaaagaaattaaaataccccacgaattccacacctccatgaagggcatctcctccaaggagccccggcagcagctggtggaggtcatcgggcagctggaggaaacccttcccgagcgcatgagggaggagctgtccgccctcaccagagaggggcagggtgggccggggagcgtttccgtggatgtcaagaaggtccagggtgctggtggcagttccgtgaccctggttgctgaagtcaacgtctcacaaactgtggatgccgatcggttagacctggaggagctgagcaaagatgaggccagtgagatggagaaggctgtggagtcggtggttcgggagagcctgagcaggcaacgcagcccagcgcctggcagcccagatgaggaaggtggagcggaggccccggctgctggcattcgcttcaggcgttgggccacccgggagctgtacatcccttcaggcgagagcgaggttgctggtggggcctctcacagctcgggacagcgcactccccagggcccagtgtcggccactgtggaggtcagcagccccacaggctttgcccagtcacaggtgctggaggatgtgagccaggctgcaaggcacataaaactcggcccctctgaagtctggaggactgagcgaatgtcatatgaaggacccactgcagaagtggtggaggtaagtgcgggaggtgacctaagtcaggcagcgagcccgaccggagccagccggtctgtgaggcatgtcacgctgggtcccggtcaaagtccactgtccagagaagtcatcttcctaggccctgcccctgcctgtccagaggcatggggctcgccagaacctggcccagcagagtcttctgcagatatggacggatcagggaggcacagcacatttggctgcagacaatttcatgctgaaaaggagattatttttcagggccccatttctgctgcagggaaggttggtgattattttgcaacagaagagtcagtgggtacccagacttctgtcaggcaactccagttaggccctaaagaagggttcagtgggcaaatccagttcacagctccactttcagacaaggtggagttgggtgtcataggagattctgtacacatggaagggttgccagggagcagcacatccatcaggcacatcagcattgggcctcagaggcatcagaccacccagcagatagtttaccatgggctggttccccaactgggggaatctggtgactcagagagcactgtgcacggagagggctcagcagatgtgcaccaggccactcacagtcatacctcgggtagacaaaccgttatgactgaaaagagcaccttccaaagtgtcgtttctgaatctccccaggaggatagtgcaggggacacatcaggggcagaaatgacatcgggtgttagcagatcctttaggcacattcgactaggtcctacagaaacggaaacctctgaacacattgccatccgtggacccgtgtccagaacatttgtgcttgctggttcagcggactcccctgagctaggcaagttagcagacagcagcagaacgctaaggcacattgcaccagggcccaaagaaacttcgtttacctttcagatggatgtgagtaacgtagaggcgatccgcagccggacacaggaagcgggagctctcggtgtgtctgaccgtggttcctggagagacgcggacagtaggaatgaccaggcagttggtgtgagctttaaggcctctgctggggaaggagaccaggcccacagagaacagggcaaggagcaggccatgtttgataagaaggtgcagctccagagaatggtagaccaaaggtcggtgatttcagatgaaaagaaagttgccctcctctatctagacaatgaggaggaggagaatgatgggcattggttttaataagcagaaacattttgttttaatggcagcctgttggcgacgtgccaacatccaaaggccttaacttattttaagaggccgagggagtctatgaaaatctccccttttttacttttttaaagagtactcccggcatggtcaatttcctttatagttaatccgtaaaggtttccagttaattcatgccttaaaaggcactgcaattttatttttgagttgggacttttacaaaacacttttttccctggagtcttctctccacttctggagatgaatttctatgttttgcacctggtcacagacatggcttgcatctgtttgaaactacaattaattatagatgtcaaaacattaaccagattaaagtaatatatttaagagtaaattttgcttgcatgtgctaatatgaaataacagactaacattttaggggaaaaataaatacaatttagactctaaaaagtcttttcaaaaagaaatgggaaataggcagactgtttatgttaaaaaaattcttgctaaatgatttcatctttaggaaaaaattacttgccatatagagctaaattcatcttaagacttgaatgaattgctttctatgtacagaactttaaacaatatagtatttatggcgaggacagctgtagtctgttgtgatatttcacattctatttgcacaggttccctggcactggtagggtagatgattattgggaatcgcttacagtaccatttcattttttggcactaggtcattaagtagcacacagtctgaatgcccttttctggagtggccagttcctatcagactgtgcagacttgcgcttctctgcaccttatcccttagcacccaaacatttaatttcactggtgggaggtagaccttgaagacaatgaagagaatgccgatactcagactgcagctggaccggcaagctggctgtgtacaggaaaattggaagcacacagtggactgtgcctcttaaagatgcctttcccaaccctccattcatgggatgcaggtctttctgagctcaagggtgaaagatgaatacaataacaaccatgaacccacctcacggaagctttttttgcactttgaacagaagtcattgcagttggggtgttttgtccagggaaacagtttattaaatagaaggatgttttggggaaggaactggatatctctcctgcagcccagcaccgagatacccaggacgggcctggggggcgagaaaggcccccatgctcatgggccgcggagtgtggacctgtagataggcaccaccgagtttaagatactgggatgagcatgcttcattggattcattttattttacacgtcagtattgttttaaagtttctgtctgtaaagtgtagcatcatatataaaaagagtttcgctagcagcgcattttttttagttcaggctagcttctttcacataatgctgtctcagctgtatttccagtaacacagcatcatcacactgactgtggcgcactggggaataacagtctgagctagcaccaccctcagccaggctacaacgacagcactggagggtcttccctctcagattcacctggaggccctcagacccccagggtgcacgtctccccaggtcctgggagtggctaccgcaggtagtttctggagagcacgttttcttcattgataagtggaggagaaatgcagcacagctttcaagatactattttaaaaacaccatgaatcagatagggaaagaaagttgattggaatggcaagtttaaacctttgttgtccatctgccaaatgaactagtgattgtcagactggtatggaggtgactgctttgtaaggttttgtcgtttctaatacagacagagatgtgctgattttgttttagctgtaacaggtaatggtttttggatagatgattgactggtgagaatttggtcaaggtgacagcctcctgtctgatgacaggacagactggtggtgaggagtctaagtgggctcagtttgatgtcagtgtctgggctcatgacttgtaaatggaagctgatgtgaacaggtaattaatattatgacccacttctatttactttgggaaatatcttggatcttaattatcatctgcaagtttcaagaagtattctgccaaaagtatttacaagtatggactcatgagctattgttggttgctaaatgtgaatcacgcgggagtgagtgtgcccttcacactgtgacattgtgacattgtgacaagctccatgtcctttaaaatcagtcactctgcacacaagagaaatcaacttcgtggttggatggggccggaacacaaccagtctttttgtatttattgttactgagacaaaacagtactcactgagtgtttttcagtttcctactggtggttttgatattgtttgtttaagatgtatatttagaatgacatcatctaagaagctgattttgctaaactcctgttccctacaatgggaaatgtcacaagaatgtgcaaaaataaaaatctgagg

SEQ ID NO: 93 - protein, 1374 aa, Homo sapiens
AESWRETVQLYEDEVRELEEALRRGQESRLQAEEETRLCAQEAEALRREALGLEQLRARLEDALLRMREEYGIQAEERQRAIDCLEDEKATLTLAMADWLRDYQDLLQVKTGLSLEVATYRALLEGESNPEIVIWAEHVENMPSEFRNKSYHYTDSLLQRENEWNLFSRQKAPLASFNHSSALYSNLSGHRGSQTGTSIGGDARRGFLGSGYSSSATTQQENSYGKAVSSQTNVRTFSPTYGLLRNTEAQVKTFPDRPKAGDTREVPVYISEDSTIARESYRDRRDKVAAGASESTRSNERTVILGKKTEVKATREQERNRPETIRTKPEEKMFDSKEKASEERNLRWEELTKLDKEARQRESQQMKEKAKEKDSPKEKSVREREVPISLEVSQDRRAEVSPKGLQTPVKDAGGGTGREAEARELRFRLGTSDATGSLQGDSMTETVAENIVTSILKQFTQSPETEASADSFPDTKVTYVDRKELPGERKTKTEIVVESKLTEDVDVSDEAGLDYLLSKDIKEVGLKGKSAEQMIGDIINLGLKGREGRAKVVNVEIVEEPVSYVSGEKPEEFSVPFKVEEVEDVSPGPWGLVKEEEGYGESDVTFSVNQHRRTKQPQENTTHVEEVTEAGDSEGEQSYFVSTPDEHPGGHDRDDGSVYGQIHIEEESTIRYSWQDEIVQGTRRRTQKDGAVGEKVVKPLDVPAPSLEGDLGSTHWKEQARSGEFHAEPTVIEKEIKIPHEFHTSMKGISSKEPRQQLVEVIGQLEETLPERMREELSALTREGQGGPGSVSVDVKKVQGAGGSSVTLVAEVNVSQTVDADRLDLEELSKDEASEMEKAVESVVRESLSRQRSPAPGSPDEEGGAEAPAAGIRFRRWATRELYIPSGESEVAGGASHSSGQRTPQGPVSATVEVSSPTGFAQSQVLEDVSQAARHIKLGPSEVWRTERMSYEGPTAEVVEVSAGGDLSQAASPTGASRSVRHVTLGPGQSPLSREVIFLGPAPACPEAWGSPEPGPAESSADMDGSGRHSTFGCRQFHAEKEIIFQGPISAAGKVGDYFATEESVGTQTSVRQLQLGPKEGFSGQIQFTAPLSDKVELGVIGDSVHMEGLPGSSTSIRHISIGPQRHQTTQQIVYHGLVPQLGESGDSESTVHGEGSADVHQATHSHTSGRQTVMTEKSTFQSVVSESPQEDSAGDTSGAEMTSGVSRSFRHIRLGPTETETSEHIAIRGPVSRTFVLAGSADSPELGKLADSSRTLRHIAPGPKETSFTFQMDVSNVEAIRSRTQEAGALGVSDRGSWRDADSRNDQAVGVSFKASAGEGDQAHREQGKEQAMFDKKVQLQRMVDQRSVISDEKKVALLYLDNEEEENDGHWF

SEQ ID NO: 94 - DNA, 3132 bp, Homo sapiens
ccgcagaacttggggagccgccgccgccatccgccgccgcagccagcttccgccgccgcaggaccggcccctgccccagcctccgcagccgcggcgcgtccacgcccgcccgcgcccagggcgagtcggggtcgccgcctgcacgcttctcagtgttccccgcgccccgcatgtaacccggccaggcccccgcaacggtgtcccctgcagctccagccccgggctgcacccccccgccccgacaccagctctccagcctgctcgtccaggatggccgcggccaaggccgagatgcagctgatgtccccgctgcagatctctgacccgttcggatcctttcctcactcgcccaccatggacaactaccctaagctggaggagatgatgctgctgagcaacggggctccccagttcctcggcgccgccggggccccagagggcagcggcagcaacagcagcagcagcagcagcgggggcggtggaggcggcgggggcggcagcaacagcagcagcagcagcagcaccttcaaccctcaggcggacacgggcgagcagccctacgagcacctgaccgcagagtcttttcctgacatctctctgaacaacgagaaggtgctggtggagaccagttaccccagccaaaccactcgactgccccccatcacctatactggccgcttttccctggagcctgcacccaacagtggcaacaccttgtggcccgagcccctcttcagcttggtcagtggcctagtgagcatgaccaacccaccggcctcctcgtcctcagcaccatctccagcggcctcctccgcctccgcctcccagagcccacccctgagctgcgcagtgccatccaacgacagcagtcccatttactcagcggcacccaccttccccacgccgaacactgacattttccctgagccacaaagccaggccttcccgggctcggcagggacagcgctccagtacccgcctcctgcctaccctgccgccaagggtggcttccaggttcccatgatccccgactacctgtttccacagcagcagggggatctgggcctgggcaccccagaccagaagcccttccagggcctggagagccgcacccagcagccttcgctaacccctctgtctactattaaggcctttgccactcagtcgggctcccaggacctgaaggccctcaataccagctaccagtcccagctcatcaaacccagccgcatgcgcaagtatcccaaccggcccagcaagacgcccccccacgaacgcccttacgcttgcccagtggagtcctgtgatcgccgcttctcccgctccgacgagctcacccgccacatccgcatccacacaggccagaagcccttccagtgccgcatctgcatgcgcaacttcagccgcagcgaccacctcaccacccacatccgcacccacacaggcgaaaagcccttcgcctgcgacatctgtggaagaaagtttgccaggagcgatgaacgcaagaggcataccaagatccacttgcggcagaaggacaagaaagcagacaaaagtgttgtggcctcttcggccacctcctctctctcttcctacccgtccccggttgctacctcttacccgtccccggttactacctcttatccatccccggccaccacctcatacccatcccctgtgcccacctccttctcctctcccggctcctcgacctacccatcccctgtgcacagtggcttcccctccccgtcggtggccaccacgtactcctctgttccccctgctttcccggcccaggtcagcagcttcccttcctcagctgtcaccaactccttcagcgcctccacagggctttcggacatgacagcaaccttttctcccaggacaattgaaatttgctaaagggaaaggggaaagaaagggaaaagggagaaaaagaaacacaagagacttaaaggacaggaggaggagatggccataggagaggagggttcctcttaggtcagatggaggttctcagagccaagtcctccctctctactggagtggaaggtctattggccaacaatcctttctgcccacttccccttccccaattactattccctttgacttcagctgcctgaaacagccatgtccaagttcttcacctctatccaaagaacttgatttgcatggattttggataaatcatttcagtatcatctccatcatatgcctgaccccttgctcccttcaatgctagaaaatcgagttggcaaaatggggtttgggcccctcagagccctgccctgcacccttgtacagtgtctgtgccatggatttcgtttttcttggggtactcttgatgtgaagataatttgcatattctattgtattatttggagttaggtcctcacttgggggaaaaaaaaaaaaaaaagccaagcaaaccaatggtgatcctctattttgtgatgatgctgtgacaataagtttgaacctttttttttgaaacagcagtcccagtattctcagagcatgtgtcagagtgttgttccgttaacctttttgtaaatactgcttgaccgtactctcacatgtggcaaaatatggtttggtttttcttttttttttttgaaagtgttttttcttcgtccttttggtttaaaaagtttcacgtcttggtgccttttgtgtgatgccccttgctgatggcttgacatgtgcaattgtgagggacatgctcacctctagccttaaggggggcagggagtgatgatttgggggaggctttgggagcaaaataaggaagagggctgagctgagcttcggttctccagaatgtaagaaaacaaaatctaaaacaaaatctgaactctcaaaagtctatttttttaactgaaaatgtaaatttataaatatattcaggagttggaatgttgtagttacctactgagtaggcggcgatttttgtatgttatgaacatgcagttcattattttgtggttctattttactttgtacttgtgtttgcttaaacaaagtgactgtttggcttataaacacattgaatgcgctttattgcccatgggatatgtggtgtatatccttccaaaaaattaaaacgaaaataaagtagctgcgattggg

SEQ ID NO: 95 - protein, 543 aa, Homo sapiens
MAAAKAEMQLMSPLQISDPFGSFPHSPTMDNYPKLEEMMLLSNGAPQFLGAAGAPEGSGSNSSSSSSGGGGGGGGGSNSSSSSSTFNPQADTGEQPYEHLTAESFPDISLNNEKVLVETSYPSQTTRLPPITYTGRFSLEPAPNSGNTLWPEPLFSLVSGLVSMTNPPASSSSAPSPAASSASASQSPPLSCAVPSNDSSPIYSAAPTFPTPNTDIFPEPQSQAFPGSAGTALQYPPPAYPAAKGGFQVPMIPDYLFPQQQGDLGLGTPDQKPFQGLESRTQQPSLTPLSTIKAFATQSGSQDLKALNTSYQSQLIKPSRMRKYPNRPSKTPPHERPYACPVESCDRRFSRSDELTRHIRIHTGQKPFQCRICMRNFSRSDHLTTHIRTHTGEKPFACDICGRKFARSDERKRHTKIHLRQKDKKADKSVVASSATSSLSSYPSPVATSYPSPVTTSYPSPATTSYPSPVPTSFSSPGSSTYPSPVHSGFPSPSVATTYSSVPPAFPAQVSSFPSSAVTNSFSASTGLSDMTATFSPRTIEIC

SEQ ID NO: 96 - DNA, 3149 bp, Homo sapiens
ccatggatggtaacttctccagcaatcagagcgctccccctcacatcagtggcatgcttcatggagatatgctcctctcactgccctctgcaccagcaacatggattgtcagctctccatcctcctccttctcagctgctctgttctcgacagcttcggggaactgattccgcagccttccaatgaagtcaatctactggattcaaaaacaattcaaggggagctgggctggatctcttatccatcacatgggtgggaagagatcagtggtgtggatgaacattacacacccatcaggacttaccaggtgtgcaatgtcatggaccacagtcaaaacaattggctgagaacaaactgggtccccaggaactcagctcagaagatttatgtggagctcaagttcactctacgagactgcaatagcattccattggttttaggaacttgcaaggagacattcaacctgtactacatggagtctgatgatgatcatggggtgaaatttcgagagcatcagtttacaaagattgacaccattgcagctgatgaaagtttcactcaaatggatcttggggaccgtattctgaagctcaacactgagattagagaagtaggtcctgtcaacaagaagggattttatttggcatttcaagatgttggtgcttgtgttgccttggtgtctgtgagagtatacttcaaaaagtgcccatttacagtgaagaatctggctatgtttccagacacggtacccatggactcccagtccctggtggaggttagagggtcttgtgtcaacaattctaaggaggaagatcctccaaggatgtactgcagtacagaaggcgaatggcttgtacccattggcaagtgttcctgcaatgctggctatgaagaaagaggttttatgtgccaagcttgtcgaccaggtttctacaaggcattggatggtaatatgaagtgtgctaagtgcccgcctcacagttctactcaggaagatggttcaatgaactgcaggtgtgagaataattacttccgggcagacaaagaccctccatccatggcttgtacccgacctccatcttcaccaagaaatgttatctctaatataaacgagacctcagttatcctggactggagttggcccctggacacaggaggccggaaagatgttaccttcaacatcatatgtaaaaaatgtgggtggaatataaaacagtgtgagccatgcagcccaaatgtccgcttcctccctcgacagtttggactcaccaacaccacggtgacagtgacagaccttctggcacatactaactacacctttgagattgatgccgttaatggggtgtcagagctgagctccccaccaagacagtttgctgcggtcagcatcacaactaatcaggctgctccatcacctgtcctgacgattaagaaagatcggacctccagaaatagcatctctttgtcctggcaagaacctgaacatcctaatgggatcatattggactacgaggtcaaatactatgaaaagcaggaacaagaaacaagttataccattctgagggcaagaggcacaaatgttaccatcagtagcctcaagcctgacactatatacgtattccaaatccgagcccgaacagccgctggatatgggacgaacagccgcaagtttgagtttgaaactagtccagactctttctccatctctggtgaaagtagccaagtggtcatgatcgccatttcagcggcagtagcaattattctcctcactgttgtcatctatgttttgattgggaggttctgtggctataagtcaaaacatggggcagatgaaaaaagacttcattttggcaatgggcatttaaaacttccaggtctcaggacttatgttgacccacatacatatgaagaccctacccaagctgttcatgagtttgccaaggaattggatgccaccaacatatccattgataaagttgttggagcaggtgaatttggagaggtgtgcagtggtcgcttaaaacttccttcaaaaaaagagatttcagtggccattaaaaccctgaaagttggctacacagaaaagcagaggagagacttcctgggagaagcaagcattatgggacagtttgaccaccccaatatcattcgactggaaggagttgttaccaaaagtaagccagttatgattgtcacagaatacatggagaatggttccttggatagtttcctacgtaaacacgatgcccagtttactgtcattcagctagtggggatgcttcgagggatagcatctggcatgaagtacctgtcagacatgggctatgttcaccgagacctcgctgctcggaacatcttgatcaacagtaacttggtgtgtaaggtttctgatttcggactttcgcgtgtcctggaggatgacccagaagctgcttatacaacaagaggagggaagatcccaatcaggtggacatcaccagaagctatagcctaccgcaagttcacgtcagccagcgatgtatggagttatgggattgttctctgggaggtgatgtcttatggagagagaccatactgggagatgtccaatcaggatgtaattaaagctgtagatgagggctatcgactgccaccccccatggactgcccagctgccttgtatcagctgatgctggactgctggcagaaagacaggaacaacagacccaagtttgagcagattgttagtattctggacaagcttatccggaatcccggcagcctgaagatcatcaccagtgcagccgcaaggccatcaaaccttcttctggaccaaagcaatgtggatatctctaccttccgcacaacaggtgactggcttaatggtgtccggacagcacactgcaaggaaatcttcacgggcgtggagtacagttcttgtgacacaatagccaagatttccacagatgacatgaaaaaggttggtgtcaccgtggttgggccacagaagaagatcatcagtagcattaaagctctagaaacgcaatcaaagaatggcccagttcccgtgtaaagcacgacggaagtgcttctggacggaagtggtggctgtggaaggcgtcaagtcatcctgcagacagacaataattctggagatactggtggaagtt

SEQ ID NO: 97 - protein, 983 aa, Homo sapiens
MDCQLSILLLLSCSVLDSFGELIPQPSNEVNLLDSKTIQGELGWISYPSHGWEEISGVDEHYTPIRTYQVCNVMDHSQNNWLRTNWVPRNSAQKIYVELKFTLRDCNSIPLVLGTCKETFNLYYMESDDDHGVKFREHQFTKIDTIAADESFTQMDLGDRILKLNTEIREVGPVNKKGFYLAFQDVGACVALVSVRVYFKKCPFTVKNLAMFPDTVPMDSQSLVEVRGSCVNNSKEEDPPRMYCSTEGEWLVPIGKCSCNAGYEERGFMCQACRPGFYKALDGNMKCAKCPPHSSTQEDGSMNCRCENNYFRADKDPPSMACTRPPSSPRNVISNINETSVILDWSWPLDTGGRKDVTFNIICKKCGWNIKQCEPCSPNVRFLPRQFGLTNTTVTVTDLLAHTNYTFEIDAVNGVSELSSPPRQFAAVSITTNQAAPSPVLTIKKDRTSRNSISLSWQEPEHPNGIILDYEVKYYEKQEQETSYTILRARGTNVTISSLKPDTIYVFQIRARTAAGYGTNSRKFEFETSPDSFSISGESSQVVMIAISAAVAIILLTVVIYVLIGRFCGYKSKHGADEKRLHFGNGHLKLPGLRTYVDPHTYEDPTQAVHEFAKELDATNISIDKVVGAGEFGEVCSGRLKLPSKKEISVAIKTLKVGYTEKQRRDFLGEASIMGQFDHPNIIRLEGVVTKSKPVMIVTEYMENGSLDSFLRKHDAQFTVIQLVGMLRGIASGMKYLSDMGYVHRDLAARNILINSNLVCKVSDFGLSRVLEDDPEAAYTTRGGKIPIRWTSPEAIAYRKFTSASDVWSYGIVLWEVMSYGERPYWEMSNQDVIKAVDEGYRLPPPMDCPAALYQLMLDCWQKDRNNRPKFEQIVSILDKLIRNPGSLKIITSAAARPSNLLLDQSNVDISTFRTTGDWLNGVRTAHCKEIFTGVEYSSCDTIAKISTDDMKKVGVTVVGPQKKIISSIKALETQSKNGPVPV

SEQ ID NO: 98 - DNA, 3166 bp, Homo sapiens
gtccgcgcgtgtccgcgcccgcgtgtgccagcgcgcgtgccttggccgtgcgcgccgagccgggtcgcactaactccctcggcgccgacggcggcgctaacctctcggttattccaggatctttggagacccgaggaaagccgtgttgaccaaaagcaagacaaatgactcacagagaaaaaagatggcagaaccaagggcaactaaagccgtcaggttctgaacagctggtagatgggctggcttactgaaggacatgattcagactgtcccggacccagcagctcatatcaaggaagccttatcagttgtgagtgaggaccagtcgttgtttgagtgtgcctacggaacgccacacctggctaagacagagatgaccgcgtcctcctccagcgactatggacagacttccaagatgagcccacgcgtccctcagcaggattggctgtctcaacccccagccagggtcaccatcaaaatggaatgtaaccctagccaggtgaatggctcaaggaactctcctgatgaatgcagtgtggccaaaggcgggaagatggtgggcagcccagacaccgttgggatgaactacggcagctacatggaggagaagcacatgccacccccaaacatgaccacgaacgagcgcagagttatcgtgccagcagatcctacgctatggagtacagaccatgtgcggcagtggctggagtgggcggtgaaagaatatggccttccagacgtcaacatcttgttattccagaacatcgatgggaaggaactgtgcaagatgaccaaggacgacttccagaggctcacccccagctacaacgccgacatccttctctcacatctccactacctcagagagactcctcttccacatttgacttcagatgatgttgataaagccttacaaaactctccacggttaatgcatgctagaaacacagatttaccatatgagccccccaggagatcagcctggaccggtcacggccaccccacgccccagtcgaaagctgctcaaccatctccttccacagtgcccaaaactgaagaccagcgtcctcagttagatccttatcagattcttggaccaacaagtagccgccttgcaaatccaggcagtggccagatccagctttggcagttcctcctggagctcctgtcggacagctccaactccagctgcatcacctgggaaggcaccaacggggagttcaagatgacggatcccgacgaggtggcccggcgctggggagagcggaagagcaaacccaacatgaactacgataagctcagccgcgccctccgttactactatgacaagaacatcatgaccaaggtccatgggaagcgctacgcctacaagttcgacttccacgggatcgcccaggccctccagccccaccccccggagtcatctctgtacaagtacccctcagacctcccgtacatgggctcctatcacgcccacccacagaagatgaactttgtggcgccccaccctccagccctccccgtgacatcttccagtttttttgctgccccaaacccatactggaattcaccaactgggggtatataccccaacactaggctccccaccagccatatgccttctcatctgggcacttactactaaagacctggcggaggcttttcccatcagcgtgcattcaccagcccatcgccacaaactctatcggagaacatgaatcaaaagtgcctcaagaggaatgaaaaaagctttactggggctggggaaggaagccggggaagagatccaaagactcttgggagggagttactgaagtcttactacagaaatgaggaggatgctaaaaatgtcacgaatatggacatatcatctgtggactgaccttgtaaaagacagtgtatgtagaagcatgaagtcttaaggacaaagtgccaaagaaagtggtcttaagaaatgtataaactttagagtagagtttgaatcccactaatgcaaactgggatgaaactaaagcaatagaaacaacacagttttgacctaacataccgtttataatgccattttaaggaaaactacctgtatttaaaaatagtttcatatcaaaaacaagagaaaagacacgagagagactgtggcccatcaacagacgttgatatgcaactgcatggcatgtgctgttttggttgaaatcaaatacattccgtttgatggacagctgtcagctttctcaaactgtgaagatgacccaaagtttccaactcctttacagtattaccgggactatgaactaaaaggtgggactgaggatgtgtatagagtgagcgtgtgattgtagacagaggggtgaagaaggaggaggaagaggcagagaaggaggagaccaggctgggaaagaaacttctcaagcaatgaagactggactcaggacatttggggactgtgtacaatgagttatggagactcgagggttcatgcagtcagtgttataccaaacccagtgttaggagaaaggacacagcgtaatggagaaagggaagtagtagaattcagaaacaaaaatgcgcatctctttctttgtttgtcaaatgaaaattttaactggaattgtctgatatttaagagaaacattcaggacctcatcattatgtgggggctttgttctccacagggtcaggtaagagatggccttcttggctgccacaatcagaaatcacgcaggcattttgggtaggcggcctccagttttcctttgagtcgcgaacgctgtgcgtttgtcagaatgaagtatacaagtcaatgtttttccccctttttatataataattatataacttatgcatttatacactacgagttgatctcggccagccaaagacacacgacaaaagagacaatcgatataatgtggccttgaattttaactctgtatgcttaatgtttacaatatgaagttattagttcttagaatgcagaatgtatgtaataaaataagcttggcctagcatggcaaatcagatttatacaggagtctgcatttgcactttttttagtgactaaagttgcttaatgaaaacatgtgctgaatgttgtggattttgtgttataatttactttgtccaggaacttgtgcaagggagagccaaggaaataggatgtttggcaccc

SEQ ID NO: 99 - protein, 462 aa, Homo sapiens
MIQTVPDPAAHIKEALSVVSEDQSLFECAYGTPHLAKTEMTASSSSDYGQTSKMSPRVPQQDWLSQPPARVTIKMECNPSQVNGSRNSPDECSVAKGGKMVGSPDTVGMNYGSYMEEKHMPPPNMTTNERRVIVPADPTLWSTDHVRQWLEWAVKEYGLPDVNILLFQNIDGKELCKMTKDDFQRLTPSYNADILLSHLHYLRETPLPHLTSDDVDKALQNSPRLMHARNTDLPYEPPRRSAWTGHGHPTPQSKAAQPSPSTVPKTEDQRPQLDPYQILGPTSSRLANPGSGQIQLWQFLLELLSDSSNSSCITWEGTNGEFKMTDPDEVARRWGERKSKPNMNYDKLSRALRYYYDKNIMTKVHGKRYAYKFDFHGIAQALQPHPPESSLYKYPSDLPYMGSYHAHPQKMNFVAPHPPALPVTSSSFFAAPNPYWNSPTGGIYPNTRLPTSHMPSHLGTYY

SEQ ID NO: 100 - DNA, 1811 bp, Homo sapiens
ggtttgtgtagagaggcgtgcagagcccgttgtccggagtgcacctgctgcctgttctgtccctcccgggagcccccgccgctgtcgccgtcgagtcgccatggaagtgcagaaagaggcacagcgcatcatgaccctgtcggtgtggaagatgtatcactcccgcatgcagcgcggtggcctgcggctgcaccggagtctgcagctgtcgctggtcatgcgcagcgcccgggagctctacctctcggccaaggtggaggccctcgagcccgaggtgtcgttgccggccgccctcccctctgaccctcgcctgcacccgccccgagaagccgagtccacggccgagacagcgacccccgacggtgagcacccgtttccggagccaatggacacgcaggaggcgccgacagccgaggagacctccgcctgctgtgccccgcgccccgccaaagtcagccgcaaacgacgcagcagcagcctgagcgacggcggggacgttggactggtcccgagcaagaaagcccgtctggaagaaaaggaagaagaggagggagcgtcatccgaagtcgccgatcgcctgcagccccctccgggccaagcggagggcgcctttcccaacctggcccgcgtcctgcagaggcgcttctccggcctcctgaactgcagccccgcggcccctccgacggcgccgcccgcgtgcgaggcaaagcccgcttgccgcccggcggacagcatgctcaacgtgctcgtgcgggccgtggtggccttctgaggaccccgagcggcgctgccggagcccagagcgcgcgtcgaaccgtcggcccgagggcgcagacctgaggcgaggccacccccctccatcctgggggaagcgcccgcgaaaaccgtggagagaagccgccgcccgggctgctgagaggcccggagaggactctgtccccggggagccatcgccttcagtgtgcagggacggcaccgaggagtctgagccgggcgcgggcgccttccgcagagacctgcgcccacaggtgctgtcttagtggactgggacgtgaacctttcgctctccttctggactgggagaagggaggcttgggtgttgtgttttttgttttgtttgtttgtttgtttttaaagatctcctcagggtcggacttcattttgtactgtgggctgtgctggccctttcaaggtttttcaagagttggttttgcgtttccaacctcggagaattccaggcactccccttccccctccgctgacatacttgtataagcggtcatcgttgcgtcatggggcaggcgtggggagcttcctgtcgccttggctgggtgtgggcctggaggaaggtcctggggcgtgcactcgcctgggcagtggggaggagagtggcctgagttacttcacccccgcgtgctgctggttaatgtcccgcgtctctgcaccttcgggtgggagcggggactgatctactttcacattctcaagtttttctcatctgcattagaggtccccagtaggttcccaggttccagcgtgcccctccctcagacacacggacacaatcagccgagaagttcctggtctgaatcacgagaatgtggaggggtggggggtgtcagtggaaaggcataaggctgagctgagaccagttgctggtgaaactgggccaatctggggaggggaacatccttgccagggagtttctgagggtctgctttgtttacctttcgtgcggtggattctttttaactccgtctacctggcgttttgttagaaatgtcagataggaaaataaaaaccatttgagt

SEQ ID NO: 101 - protein, 223 aa, Homo sapiens
MEVQKEAQRIMTLSVWKMYHSRMQRGGLRLHRSLQLSLVMRSARELYLSAKVEALEPEVSLPAALPSDPRLHPPREAESTAETATPDGEHPFPEPMDTQEAPTAEETSACCAPRPAKVSRKRRSSSLSDGGDVGLVPSKKARLEEKEEEEGASSEVADRLQPPPGQAEGAFPNLARVLQRRFSGLLNCSPAAPPTAPPACEAKPACRPADSMLNVLVRAVVAF

SEQ ID NO: 102 - DNA, 662 bp, Homo sapiens
accgccgacgcagacccctctctgcacgccagcccgcccgcacccaccatggccacagttcagcagctggaaggaagatggcgcctggtggacagcaaaggctttgatgaatacatgaaggagctaggagtgggaatagctttgcgaaaaatgggcgcaatggccaagccagattgtatcatcacttgtgatggtaaaaacctcaccataaaaactgagagcactttgaaaacaacacagttttcttgtaccctgggagagaagtttgaagaaaccacagctgatggcagaaaaactcagactgtctgcaactttacagatggtgcattggttcagcatcaggagtgggatgggaaggaaagcacaataacaagaaaattgaaagatgggaaattagtggtggagtgtgtcatgaacaatgtcacctgtactcggatctatgaaaaagtagaataaaaattccatcatcactttggacaggagttaattaagagaatgaccaagctcagttcaatgagcaaatctccatactgtttctttcttttttttttcattactgtgttcaattatctttatcataaacattttacatgcagctatttcaaagtgtgttggattaattaggatcatccctttggttaataaataaatgtgtttgtgct

SEQ ID NO: 103 - protein, 135 aa, Homo sapiens
MATVQQLEGRWRLVDSKGFDEYMKELGVGIALRKMGAMAKPDCIITCDGKNLTIKTESTLKTTQFSCTLGEKFEETTADGRKTQTVCNFTDGALVQHQEWDGKESTITRKLKDGKLVVECVMNNVTCTRIYEKVE

SEQ ID NO: 104 - DNA, 2558 bp, Homo sapiens
gaactgccacctggaagatacaggtggaaacccgaaaacagagtattgtatgggagtttgaaaaataccagcgattactagagaaaaagcagccaccacatcggcagctgggggcagaggtagcagcagctctggccagcctacagcgggaggcagcggagaccatgcagaaactggagttgaaccatagcgagctcatccagcagagccaggtcctgtggaggatgattgcagagttgaaagagaggtcgcagaggcctgtccgctggatgttgcaggatattcaggaagtgttaaacaggagcaaatcttggagcttgcagcagccagaaccaatctccctggagttgaagacagattgccgtgtgctggggctaagagagatcctgaagacttatgcagctgatgtgcgcttggatccagatactgcttactcccgtctcatcgtgtctgaggacagaaaacgtgtgcactatggagacaccaaccagaaactgccagacaatcctgagagattttaccgctataatatcgtcctgggaagccagtgcatctcctcaggcaggcactactgggaggtggaggtgggagacaggtctgagtggggcctgggagtatgtaagcaaaatgtagaccggaaggaggtggtctacttatccccccactatggattctgggtgataaggctgaggaagggaaatgagtaccgagcaggcaccgatgagtacccaatcctgtccttgccggtccctcctcgccgggtgggaatcttcgtggattatgaggcccatgacatttctttctacaatgtgactgactgtggctcccacatcttcactttcccccgctatcccttccctgggcgcctcctgccctattttagtccttgctacagcattggaaccaacaacactgctcctctggccatctgctccctggatggggaggactaagaaagctaccaccctaaccacagaggcttggaattgggcctggcccccatggggcttggaggaccgagccactgacaggtatcccctgaaactgagctgagcccagtatccaaggattcctctgtctgatcctttggtctttgctaccaggctgaagtctgtcatgaaaccacttattttaaaaagcagaggcccagtcaaatgagcattgcatcccatgagggaagcacgacagggctgatggtgaggatcagagcagttctaaggtgactcgttggggtaaggatcaggactttgtccatgtagtagccaaccaccctcttccctgattcccgtccggtgtcacagttcagtcagtgaggatgatgaagtagatacagtcttcaggacaccattagatgggctttcccaataggccaaaaaaatgctgcgcatacccagagctggttgttgtgctgaggccagtcagaggatgcttcccctgaggtttgctataactaagcaacctttatgtgactctcaccttctgacctcctggcaagagaaattcagtgcagcagggggacacagacctgcccaagccaccccactgccgttccctctctgagcacaagctgggcaaatcactgtcccttggactccagtagaccagtgtcctagtcttgctttttttctctaagtggcaggatcagaaaacctgcgagctttagtttgtattttcactttatgaatgaggaaactgaaatggccttaagggagcaagttatttcttttttttttgacacggagtctcgctctgttgcccaggctggagtgcagtggcacgatctcggctcactgcaggctctgcctcctgggttcacgccattctcctgcctcagcttcccgagtagctgggactacaggcgcccaccacgacgcctggctcatttttttgtatttttagtagagacggggtttcaccatgttagctaggatggtctcgatctcctgacctcatgatccgccctcctcagcctcccacagtgctgggattagaggcatgagccactgcgcccggcccctggagcaagttatttcttacaaagctgctgaaggtaagattatcaaaattataaagcatttttcacactcaagtgaaacaaggttgacaaactcacttcgcaggtcacatgcctatacatcacttattatatttgggtctgaaacttctcacatgtttgggaggttttatgtgtcctcattgggaaaatgggtgtaattcagcataaaacctcatatgattgtcctgcctcatggagctgttgtatagatcccagatccatcccatgatttgttcctgtctgaggcatagaggcaggcaagccgtggattttgcacatggtgactttcccactgtgccatgatacagtctgcatcttatagcagtgcctttgtctcagggcctctgctggcagtctagaccttttgggcagaaaggagcttcaaatggctgtgataaggaatattaaaaattgtgtttctactttaattgtattggctgttcatgtatgtaggagttaaaataggccaaactggggaaataaacgcattctgtccaccatg

SEQ ID NO: 105 - protein, 262 aa, Homo sapiens
MQKLELNHSELIQQSQVLWRMIAELKERSQRPVRWMLQDIQEVLNRSKSWSLQQPEPISLELKTDCRVLGLREILKTYAADVRLDPDTAYSRLIVSEDRKRVHYGDTNQKLPDNPERFYRYNIVLGSQCISSGRHYWEVEVGDRSEWGLGVCKQNVDRKEVVYLSPHYGFWVIRLRKGNEYRAGTDEYPILSLPVPPRRVGIFVDYEAHDISFYNVTDCGSHIFTFPRYPFPGRLLPYFSPCYSIGTNNTAPLAICSLDGED

SEQ ID NO: 106 - DNA, 4684 bp, Homo sapiens
actggcgtccggcgtgtaccgagagactggcgtccggtgtgcaggtggccacatggatcctggcagccggtggcggaacctgcccagcgggcctagcctaaagcacttgactgacccctcttatggaatcccgcgggaacagcaaaaggcagcgttgcaggagctgacgcgggcgcacgtggagtccttcaactacgctgtgcacgagggtctcggcctcgcggtgcaggctatacctccctttgaatttgctttcaaagatgagcgtatctcttttactattctggatgctgttatcagtccacctacagttccaaaagggaccatctgcaaagaggccaatgtttatccagcagaatgccggggccgaaggagtacctaccgtgggaagttgacagctgatatcaactgggcagtgaatggaatctcaaaaggaatcattaagcagtttcttggctatgttcccatcatggtgaaatccaagctttgcaacttacgtaaccttcccccacaagccctcattgagcaccatgaggaggcagaggaaatggggggctattttataatcaatggcattgaaaaagtcatccgaatgttgattatgcctcggagaaattttcccattgcaatgataagaccaaaatggaaaaccagagggcctggttatactcagtatggagtttcaatgcactgtgtgagggaagaacattccgctgtcaatatgaacctccactacttggaaaatggcacagttatgttgaactttatttaccgaaaagaactgttctttcttcctttgggatttgcacttaaggcacttgtcagcttttctgattatcagatctttcaggagctcatcaaaggaaaagaggatgattctttccttaggaactctgtttctcagatgttaaggattgtaatggaagagggttggttgacacaaaaacaggtccttaactacctaggtgaatgcttcagagtaaaactcaatgttcctgactggtacccaaatgagcaagctgcggagttcctgtttaaccagtgcatctgtatccacttgtaatccaatactgaaaagttttatatgctttgtctcatgacgcgaaagctctttgctttagccaaaggagagtgcatggaggacaatcctgatagtttggtgaaccaggaagtcctcacaccgggtcagctcttccttatgttcctgaaggaaaaactggaaggttggttagtgtctattaaaatagcttttgataagaaggctcagaagaccagtgtttccatgaacactgacaatttgatgaggatttttacaatgggcatagaccttacaaaaccatttgaatacctttttgctactgggaatctgcgttctaaaacaggtcttggcctcctacaagattctggactttgtgttgtggctgacaagctgaacttcatacgctacctctcccatttccgctgcgtgcacagaggggctgattttgccaagatgaggaccaccacagtacgcaggctgctgccagagtcctggggcttcctttgtcccgtgcataccccagacggggagccctgtggcctgatgaaccacctaactgccgtatgtgaggtcgtcacacagtttgtgtatacggcatctattccagctttactgtgcaacttgggggtcactcccattgatggagctccccaccgatcatacagtgagtgctaccctgtcctgctggacggcgtcatggttggctgggtggataaggatcttgctccaggcatcgcagattctcttcgtcattttaaggtgttgagagagaaaagaattcctccctggatggaagtggtccttatacccatgacaggaaaaccaagtctgtacccaggattgttcctttttaccactccttgtagactggtacggcctgtgcagaacttagcattgggcaaagaagagctaattggaactatggaacagatcttcatgaatgtcgctatctttgaggatgaagtttttgctggagttaccacacaccaggaactctttccacacagcctgctgagtgtgattgccaacttcatccctttctctgatcacaaccagagtccacggaacatgtaccaatgccagatgggtaagcaaactatgggctttccacttctcacttatcaagaccgatcggataacaaactgtatcgtcttcagactcctcagagtcccttggtgagaccctccatgtatgattattatgacatggataactatccaattgggaccaatgccatcgttgctgtgatttcttacactggctatgatatggaagatgccatgattgtgaataaggcctcttgggaacgaggctttgcccatggaagtgtctacaagtctgagttcatagacctctctgaaaaaattaaacaaggagatagtagcctggtgtttggcatcaaacctggtgacccacgcgttctgcagaagttagatgacgatggattgccgtttataggagcaaaactgcagtacggagatccgtattacagctacctcaacctcaacaccggggaaagttttgtaactggatgttgtttaacttgatgttgaccttttggattaagaggactatcagattaaagcaaaatgtaattttaattcaatgaagatatcattaccaggttactcttgagatttttcaacggtgttagaactctcaaccaagacctgaaaaccaagtatgcaaggtttctgaatctctctggtagattaactattgacaatgattttctgttatctttgttcaaaaagttcatgtcttctcaaaatatgaaatattgataaatggaagagcatacggtgacaagtctcctttccaaccccaggttccctacaccctgctctcagcaggcagtgagtgtcacacacctgttaatccatcttgagcaggacagtactatacaaatagaatgcaagctgtaatgtaattttatattttcttatagccacgttgaagtaaaaacaaacaggtacagtgttttttaccagctttatagaagtacagttgttacatatttaatgaatacaatttgatgggtctgactatatgcacacacctttgataccatcaccacaatcagggtaataaacatacctgtcatctccacaagtttcctcctgcccctttgttttttgctttttggttgctgttgagtttttgttttgtcttctgtggtaagaacacctaactcaagacctaccctcttaacaaatctttaagtgcacgatatagtattgttaattccaggcaccatgttgtacaacagatctttagaccttacttgtcttgcataactgaagctttatacctgttgaacaactctccatttccctggcccctagcaaccacccttctaccctgtttctatgagtttgactattacagatatctcatatagtgggatcatgcaatatttgtcctgtgactggcttatttcacttagcatagtgaaataagattcatccattttggaagccaggcatggtgctgtgcatctatagtccctgctatttgagaggctgaggtgggaggatcatttgagtgcaggagttcaaggacagcctgggtaatataggaagaccctgtcttaaagaccctgacctcaagtgatccacccacctcggcctccgaaagtgctaggattacaggtgtgagccactgtgcctggcctccggtgagtattttatatttagtctacacttccatacttggcttttttctgcttttatattgatctgctttcatagcagtgtgtagagtgccacttatgttttctttcttgtgtacagtattttattgtatggatttaccatcccctgtgtatttaagttgttccattctttggccattataacttttttctgcaaatattctggtgacttatctttggccattataaactgttgataatagatcatcttgtatatacttctgcaattataagatgttttttgatgatgagagctttcctaaggtaattctttcctgagtttggttcagatggtctgtcactaattataaggcagataggaacagacagaaaaatctatcatttcaagataggcttagcaggatgggcgcagtggctcacgccactaatcccaacattttaggaggcctaggcaggagcaatcacttgtgcctgggagttctagactagcctgggcgagacttcatctctacaaaaaaagcaacaacgacaaaaaaaattagccaagcatagtggcacacccctgtagtcccagctacttgggaggctgaggtgggaggattgcttgaacccaagaggtcgaggctgcagtgagccaagattgtgccactgcactccagcctgggtgacagagcaggaccctgtctctattttataaattaaaaaaggctgggtgtggtggctcacacccataatcccaacactttggctcagcagattgcttgaacccaggaattcaagtccaatctgggcaacatggggaaaccccagctctacaaaaaaaattagcctggtgtggtggcacatgcctgtagttccagctactcaggaggctgaggtgggagaatctcctgagcctggaaggtccaggcagtgagccaagattgtgccaccacactccagcctgggcgacagaatgagaccctgtctc

SEQ ID NO: 107 - protein, 336 aa, Homo sapiens [sequence omitted]

SEQ ID NO: 108 - DNA, 3035 bp, Homo sapiens
tttataatattccacctaataatgaaacgaatttagaagattgctcagtaatgcagccacctgttgcctatccagaagaaaatacactactcatcaaggaagaaccagatttagatggtgctctactctcggggccagatggtgataggaatgtgaatgcaaatttattggctgaagctggcactagtcaagatggaggtgatgctggtacttcacatgatttcaagtatggtttgatgcctggtccttcaaatgatttcaagtatggattattgccagaatcttggccaaaacaagaaacctgggaaaatggtgaatcatctctaatcatgaacaagttaaaatgccctcattgtagctatgtagccaaatacagacgaacactaaaaaggcacttgctcattcacacaggagtgagatcatttagctgtgatatttgtggaaaactgtttactcgaagagaacatgtaaaaagacattccctggtgcataaaaaggataaaaaatacaaatgtatggtgtgtaagaagatcttcatgttagcagccagtgttggaataagacatggatctcgacgttatggtgtttgtgtagactgtgcagataaatcacagccaggagggcaagaaggtgtagatcagggacaggatacagaattccctcgggatgaagaatacgaggagaatgaagtaggagaagctgatgaagagctagttgatgatggagaagatcagaatgatccctctcgatgggatgaatcaggagaagtttgtatgtctctagatgattaactgacctactatactcctcaaggatgctgcatttggacctaatatgaatcgacaatttggattgttgaacttgaaggcttgcaaaatatggtacatgctggatagtagttatgttgctgtgaaaactgtagggtcaaagccttatagcaaaaaaaatttttttttatatttgcacaggactatacagcaaacaaccatgtggttggattacatggagtccccacatactcagtcagttatcaaagtaaaatattttttatttataggatatacagtaactatttgggtcctatgaaaatagtccttaaagagcttacattcatgtgctactttaacatgaatggagaaaatccatttatggaagtacagtgacaattgacccaatcactctgtccatcaaaccactcaggctagtttgtactagtagagttttgtttctatttttatttttattaattttattttttttaatacagattttcagtgaggggctttttcaaccccattggttctattttcttgtatttttccatttaatttgcttcataacttaaaccaagtctcttctagtcttaggtattatttctcgattttgtgctgatgggcatgtttataagaactggagaggtaatttattggaatgaactaactgacttcctccattcccctcttcctttttgacatgaattttactacttcacaaatgaagaatgatgttatgaagttaccgtggcgaagttgacaaataccactaaaatgattatgatttagaagtaactttcttctgctgctctaatctgataaatggttactatatgatattttctgacatggtatttggttttgggtatctgttactttggcactattcttgtttgcctctttatttttgccagtgtactatacctcagtcctatttgaaagacctaattgaaagaaaaatcatagaaataagtaaaatgatttgttttataatttatccaccatgtccagtttggttagcttgttatgcaatataagtgaaatatcaggtttttacccgtgtcccttttatcatgaaaattaacacaaaatgtgcattctcttttgtttcatacttagcgggatattgattgttttgaaattatgatcaatacttaatttatttttttctgtccttgaagtcactacaccttgatacagtctttctagtagtcaccatgattcaacagtctcaaaaatcttacaaataaaattctgagaagctttattattctataaattcttcagggtacaaagggtgacatattgaggtgaaattgtcagatttacttagcctggtgacatgaattagctgattgtggaactctcagcagcatttcacgtattgttaacatgtatggcatttattagcatattgtatattatataagattgagggatgtcatattttcagctttcttttaaataaaaattgagtatattttcctattttatatcaggtaactaaattatgctagttatgtggaaaaaattgcaaagatgctttgacagatataatccctttggtgctccatctgatcaaagttgaaaagttgatgttttttaagagacaagctttatcattgtctctgatttcagtagaataatggtttattgttagacaatgatgtttctgcttggataaatcaaagataaattacagttacatggttagatgcatcttttgtcatctatattgtagtttctacataactgtaaacctgacagataagaatagtttcggtttgatttttgtttaaaacagatgagtacttcttaatgttctagacaaatgagtaaaatgtatttctggtagaaattagttgggcaaagatactatgaatgaaaaagtattttaaacgtaaaatgttctttgtgaatatgtaagtatagtataaagatttctttcatcccatttatccccttcctttaaataaactagtttacaattggtagatctgtctatatataaatatatattaaagaacaaagatatatatctaaaaatcacctaaatctgctttattagactacagttcacttattgcatagaaactggacttggctttacattcttaatgtacttttacttttcctcaagatatgaacttactctcttgaagctgaattttcttttactacttaaatcatttatgtatatctggtaaattatgaccaaatttttgttagattgcatacagtaaattgaaatacacacttggt

SEQ ID NO: 109 - protein, 246 aa, Homo sapiens
MQPPVAYPEENTLLIKEEPDLDGALLSGPDGDRNVNANLLAEAGTSQDGGDAGTSHDFKYGLMPGPSNDFKYGLLPESWPKQETWENGESSLIMNKLKCPHCSYVAKYRRTLKRHLLIHTGVRSFSCDICGKLFTRREHVKRHSLVHKKDKKYKCMVCKKIFMLAASVGIRHGSRRYGVCVDCADKSQPGGQEGVDQGQDTEFPRDEEYEENEVGEADEELVDDGEDQNDPSRWDESGEVCMSLDD

SEQ ID NO: 110 - DNA, 5645 bp, Homo sapiens
cttagggcgaattggagctccccgcggtggcggccgaggtacgcgggaggaagaggctggggaccgcggcgaaggtggtgagtgctcttgggcgccttctcccaacgtccctgccagactcgcctccgggctgattctccagttggtttcctggactccagagtagctgtccggcctggccccggaggtgcaaagtaagaaaattgaagtcaaagaccatgggagatacagcaaaaccttatttcgtgaagcgcactaaagaccgggggactatggatgatgatgacttcagaaggggtcacccccaacaagattatttaataatagatgaccatgctaaaggccatggcagtaaaatggaaaagggccttcaaaaaaagaagataacaccagggaactatgggaatacccccagaaaaggaccatgtgctgtttccagcaatccatatgcatttaaaaacccaatctacagtcaacccgcttggatgaatgacagccacaaagatcagagtaagagatggctgtctgatgaacatactggtaattcagacaactggagagaattcaaacctggacctagaattcctgttataaaccgacaaagaaaagactcctttcaagaaaatgaagatggttataggtggcaagacacaagaggctgcagaactgtaagacgactgtttcataaagacctaacaagcctagaaaccacgtcagaaatggaagcaggaagtcctgaaaacaagaagcagaggtccagacctaggaagccacggaagactagaaatgaggaaaatgagcaggatggagacttggaaggccctgtgatcgatgagtctgtactttcaacgaaggagctgctaggcttacagcaggctgaggagagactgaagagagactgcattgacaggctaaaaaggcgaccacgaaactaccctacagcaaagtacacctgcagactctgtgatgttttaattgaatccattgcatttgcccataagcatatcaaggaaaagaggcacaagaaaaacattaaggagaagcaagaggaagagttgctcactacgttacccccaccaacaccctcccagataaatgcagttggcattgccattgacaaagtggtacaggaatttggcttacacaatgagaacttggaacagaggctggaaattaaacgtatcatggaaaatgtgttccaacacaagttaccagattgttccctaagattatatgggtcatcctgtagcagattgggtttcaaaaattcggatgtaaacattgacatccagtttccagccattatgtctcagccagatgtcctcttacttgttcaagaatgtttaaagaacagtgactcctttattgatgttgatgcagacttccatgctagggtgccagtggtggtgtgcagagaaaagcaaagtggtcttctgtgtaaagtgagcgcaggaaatgaaaatgcttgtctgacaacaaagcatttaactgcccttggaaaactagaaccaaagctggttcctttggtgattgcatttaggtactgggcaaagctttgcagtatagatcgccctgaagaaggaggtctgccaccttatgtgtttgccctgatggccattttctttcttcagcagaggaaagaaccccttttgcctgtatatctaggatcatggattgaaggattctcattaagcaaactagggaatttcaaccttcaagacattgaaaaagatgttgtgatctgggaacatactgacagtgctgcaggggacacaggcataacaaaagaagaggcaccaagagaaacgccgattaaaaggggacaggtgtcattaatattggatgtgaaacaccagccttcagtaccagttgggcagctctgggtggaattgctgcggttctatgctttagaatttaatttggctgatttagtgataagtattcgtgtcaaagaattggtatctcgggaattgaaggattggcccaaaaagcgcattgccattgaagatccctactctgttaaaagaaatgtggcaagaaccctaaatagtcaacctgtgtttgaatatatacttcattgtttaaggacaacatacaagtattttgctcttccacacaaaattacaaaatccagccttctaaagcctctgaatgcaattacatgtatttcagaacattctaaagaagtaataaatcatcatccagatgtacaaacaaaagatgataagctcaaaaactcagttttggcccaaggtcctggtgctaccagttcagctgcaaatacctgtaaggtacagccacttactcttaaagagactgctgaaagttttggaagcccaccaaaagaagaaatgggaaatgaacacatcagtgtccaccctgaaaactcagactgtatccaagcagatgttaactctgatgattacaagggtgataaagtataccatccagaaacaggaaggaaaaacgagaaagagaaagttggaaggaagggcaagcatctgttgactgttgatcagaaacgtggagagcatgttgtctgtggcagcacacgtaataatgagtcagagagcactttggatttagaaggcttccaaaatcccacagctaaagagtgtgagggacttgccactttagataacaaggctgatcttgatggagaaagtacagaaggtactgaggaactagaagactctctaaaccactttacccactcagtacagggccagacatcagaaatgattccctctgatgaagaggaggaggacgacgaagaagaggaggaggaagaagaacctaggctcaccattaaccaaagggaagatgaagatggcatggctaatgaagatgagttagacaacacctacactgggtcaggggatgaggacgccctatctgaagaggatgatgagttaggcgaagctgctaagtatgaagacgtgaaagaatgtggaaaacatgtagaaagagctctcctagtggaacttaataaaataagtctcaaggaagaaaatgtatgtgaagaaaattcacctgtggatcagtctgattttttttatgaattcagtaaacttatcttcaccaaaggcaagtctcctacggtagtgtgcagcttatgcaaacgagagggtcatctaaagaaggactgtcctgaagacttcaaaagaatccagctagaacctctgccaccattaacacccaagtttttaaatatcttagatcaagtctgtatccagtgttataaggatttttctccaacaattatagaagatcaggctcgtgaacatattcggcaaaacctagaaagtttcataagacaggactttccaggaactaaattgagcctgtttggctcctccaaaaatggatttgggttcaaacagagtgaccttgacgtctgtatgacaattaatggacttgaaactgctgagggattggactgtgtcagaactattgaagaattagcaagagtcctcagaaaacattcaggtctgagaaacatcttacctattacaacagcaaaggtgccaattgtgaagttcttccatttgagaagtggtctggaagtagatatcagtttgtataacacattggcccttcataacacaaggcttttatctgcttattccgccattgatcccagagtgaagtatttgtgctataccatgaaagtatttacaaagatgtgtgatattggtgatgcatctagaggcagcttatcatcgtatgcatatactcttatggtgctatattttctccagcagaggaatccaccagtcattcctgtccttcaagagatatacaaaggtgaaaagaaacctgaaatatttgttgatggctggaatatttatttttttgatcaaatagatgaactgcctacctattggtcagaatgtggaaaaaatacagaatctgttgggcagttatggttgggccttcttcgtttctacacagaggaatttgattttaaagaacatgttattagcatcaggagaaaaagtctgcttacaacttttaagaaacagtggacctcaaaatacattgttattgaagatccctttgatttgaatcataatcttggagctggattatcaaggaaaatgacaaattttataatgaaggcttttatcaatggtagaagagtatttggtattcctgtcaagggatttccaaaggactacccctcaaaaatggaatacttttttgatccagatgtgttaactgaaggagagctggccccaaatgatagatgttgtcgaatttgtggaaaaatcggacacttcatgaaggactgtcctatgaggagaaaagtaagacggcggcgagatcaggaagatgccctgaaccaaagataccctgagaacaaggaaaaaagaagcaaagaggacaaagaaattcacaacaagtacacagaaagggaggtgtcaacaaaagaagataagcccatacagtgcacacctcagaaagccaagccaatgcgggcagctgctgacctggggagggagaagatcctcaggccaccagtagaaaaatggaagagacaggatgacaaagacttaagagaaaaacgttgttttatttgtggaagagaagggcacattaaaaaggaatgcccacagtttaaaggctcttcaggtagcctttccagtaaatatatgactcagggaaaagcctcagcgaagaggacccagcaggaatcatgagggaaggaaaatgcagcactctaaatggccactcaggcgttcctattcactcggaaaattaggttcatttcacaggacacagcagtgtagatcaggcttcaacttaacatttaagggaaatgtcagatttttttttaatttaatgaaattgttaatgaggaaaaatttttaatatagtcttatctaccacacatccccatagatttaaggattttaatagaaagtcatgatgtatgtatttaagccacgttaaaagaaaaaatataactatggaccggtattcagtgaatacagtttcatggtttttaattctttcaaagcacattaaaaatggtgtgctgataaaccccaagtaaattaaccctttttccgtataaatccattttttgttttgaagaggggaaattatatttattgttgtttactgaatcctggtgtgaaagcatatcagatatgtatgaactgctactgctgtacttccgatttacggacatcattttattgctatttgtagacgtgataacatgaacatgagtacctatttatgtgggccttcagtggatgggcagtgccactcaggtctctggggtttccctctctaattttaagtaaattgacatataactactatgcttataaaaatgaagtaaggaaaacaagtagtcctgtttgccactaaaaacattttcaaaggaaaaataaaatgaaagtactttttactttttatgatactcagaaattaggatgaagaacttttaaaattgctgaagatcaaagaggttatctctgccagtcacaagtgtggctggtgtcattctgggtctgactggagccctcctggactgtttctttaatttcaaaagccctgcagacatagtacctggtcagaactatgcctcggtttatttatcattttgaaataaaatcaaaatttcaacctgt

SEQ ID NO: 111 - protein, 1494 aa, Homo sapiens
MGDTAKPYFVKRTKDRGTMDDDDFRRGHPQQDYLIIDDHAKGHGSKMEKGLQKKKITPGNYGNTPRKGPCAVSSNPYAFKNPIYSQPAWMNDSHKDQSKRWLSDEHTGNSDNWREFKPGPRIPVINRQRKDSFQENEDGYRWQDTRGCRTVRRLFHKDLTSLETTSEMEAGSPENKKQRSRPRKPRKTRNEENEQDGDLEGPVIDESVLSTKELLGLQQAEERLKRDCIDRLKRRPRNYPTAKYTCRLCDVLIESIAFAHKHIKEKRHKKNIKEKQEEELLTTLPPPTPSQINAVGIAIDKVVQEFGLHNENLEQRLEIKRIMENVFQHKLPDCSLRLYGSSCSRLGFKNSDVNIDIQFPAIMSQPDVLLLVQECLKNSDSFIDVDADFHARVPVVVCREKQSGLLCKVSAGNENACLTTKHLTALGKLEPKLVPLVIAFRYWAKLCSIDRPEEGGLPPYVFALMAIFFLQQRKEPLLPVYLGSWIEGFSLSKLGNFNLQDIEKDVVIWEHTDSAAGDTGITKEEAPRETPIKRGQVSLILDVKHQPSVPVGQLWVELLRFYALEFNLADLVISIRVKELVSRELKDWPKKRIAIEDPYSVKRNVARTLNSQPVFEYILHCLRTTYKYFALPHKITKSSLLKPLNAITCISEHSKEVINHHPDVQTKDDKLKNSVLAQGPGATSSAANTCKVQPLTLKETAESFGSPPKEEMGNEHISVHPENSDCIQADVNSDDYKGDKVYHPETGRKNEKEKVGRKGKHLLTVDQKRGEHVVCGSTRNNESESTLDLEGFQNPTAKECEGLATLDNKADLDGESTEGTEELEDSLNHFTHSVQGQTSEMIPSDEEEEDDEEEEEEEEPRLTINQREDEDGMANEDELDNTYTGSGDEDALSEEDDELGEAAKYEDVKECGKHVERALLVELNKISLKEENVCEENSPVDQSDFFYEFSKLIFTKGKSPTVVCSLCKREGHLKKDCPEDFKRIQLEPLPPLTPKFLNILDQVCIQCYKDFSPTIIEDQAREHIRQNLESFIRQDFPGTKLSLFGSSKNGFGFKQSDLDVCMTINGLETAEGLDCVRTIEELARVLRKHSGLRNILPITTAKVPIVKFFHLRSGLEVDISLYNTLALHNTRLLSAYSAIDPRVKYLCYTMKVFTKMCDIGDASRGSLSSYAYTLMVLYFLQQRNPPVIPVLQEIYKGEKKPEIFVDGWNIYFFDQIDELPTYWSECGKNTESVGQLWLGLLRFYTEEFDFKEHVISIRRKSLLTTFKKQWTSKYIVIEDPFDLNHNLGAGLSRKMTNFIMKAFINGRRVFGIPVKGFPKDYPSKMEYFFDPDVLTEGELAPNDRCCRICGKIGHFMKDCPMRRKVRRRRDQEDALNQRYPENKEKRSKEDKEIHNKYTEREVSTKEDKPIQCTPQKAKPMRAAADLGREKILRPPVEKWKRQDDKDLREKRCFICGREGHIKKECPQFKGSSGSLSSKYMTQGKASAKRTQQES

SEQ ID NO: 112 - DNA, 5531 bp, Homo sapiens
cttagggcgaattggagctccccgcggtggcggccgaggtacgcgggaggaagaggctggggaccgcggcgaaggtggtgagtgctcttgggcgccttctcccaacgtccctgccagactcgcctccgggctgattctccagttggtttcctggactccagagtagctgtccggcctggccccggaggtgcaaagtaagaaaattgaagtcaaagaccatgggagatacagcaaaaccttatttcgtgaagcgcactaaagaccgggggactatggatgatgatgacttcagaaggggtcacccccaacaagattatttaataatagatgaccatgctaaaggccatggcagtaaaatggaaaagggccttcaaaaaaagaagataacaccagggaactatgggaatacccccagaaaaggaccatgtgctgtttccagcaatccatatgcatttaaaaacccaatctacagtcaacccgcttggatgaatgacagccacaaagatcagagtaagagatggctgtctgatgaacatactggtaattcagacaactggagagaattcaaacctggacctagaattcctgttataaaccgacaaagaaaagactcctttcaagaaaatgaagatggttataggtggcaagacacaagaggctgcagaactgtaagacgactgtttcataaagacctaacaagcctagaaaccacgtcagaaatggaagcaggaagtcctgaaaacaagaagcagaggtccagacctaggaagccacggaagactagaaatgaggaaaatgagcaggatggagacttggaaggccctgtgatcgatgagtctgtactttcaacgaaggagctgctaggcttacagcaggctgaggagagactgaagagagactgcattgacaggctaaaaaggcgaccacgaaactaccctacagcaaagtacacctgcagactctgtgatgttttaattgaatccattgcatttgcccataagcatatcaaggaaaagaggcacaagaaaaacattaaggagaagcaagaggaagagttgctcactacgttacccccaccaacaccctcccagataaatgcagttggcattgccattgacaaagtggtacaggaatttggcttacacaatgagaacttggaacagaggctggaaattaaacgtatcatggaaaatgtgttccaacacaagttaccagattgttccctaagattatatgggtcatcctgtagcagattgggtttcaaaaattcggatgtaaacattgacatccagtttccagccattatgtctcagccagatgtcctcttacttgttcaagaatgtttaaagaacagtgactcctttattgatgttgatgcagacttccatgctagggtgccagtggtggtgtgcagagaaaagcaaagtggtcttctgtgtaaagtgagcgcaggaaatgaaaatgcttgtctgacaacaaagcatttaactgcccttggaaaactagaaccaaagctggttcctttggtgattgcatttaggtactgggcaaagctttgcagtatagatcgccctgaagaaggaggtctgccaccttatgtgtttgccctgatggccattttctttcttcagcagaggaaagaaccccttttgcctgtatatctaggatcatggattgaaggattctcattaagcaaactagggaatttcaaccttcaagacattgaaaaagatgttgtgatctgggaacatactgacagtgctgcaggggacacaggcataacaaaagaagaggcaccaagagaaacgccgattaaaaggggacaggtgtcattaatattggatgtgaaacaccagccttcagtaccagttgggcagctctgggtggaattgctgcggttctatgctttagaatttaatttggctgatttagtgataagtattcgtgtcaaagaattggtatctcgggaattgaaggattggcccaaaaagcgcattgccattgaagatccctactctgttaaaagaaatgtggcaagaaccctaaatagtcaacctgtgtttgaatatatacttcattgtttaaggacaacatacaagtattttgctcttccacacaaaattacaaaatccagccttctaaagcctctgaatgcaattacatgtatttcagaacattctaaagaagtaataaatcatcatccagatgtacaaacaaaagatgataagctcaaaaactcagttttggcccaaggtcctggtgctaccagttcagctgcaaatacctgtaaggtacagccacttactcttaaagagactgctgaaagttttggaagcccaccaaaagaagaaatgggaaatgaacacatcagtgtccaccctgaaaactcagactgtatccaagcagatgttaactctgatgattacaagggtgataaagtataccatccagaaacaggaaggaaaaacgagaaagagaaagttggaaggaagggcaagcatctgttgactgttgatcagaaacgtggagagcatgttgtctgtggcagcacacgtaataatgagtcagagagcactttggatttagaaggcttccaaaatcccacagctaaagagtgtgagggacttgccactttagataacaaggctgatcttgatggagaaagtacagaaggtactgaggaactagaagactctctaaaccactttacccactcagtacagggccagacatcagaaatgattccctctgatgaagaggaggaggacgacgaagaagaggaggaggaagaagaacctaggctcaccattaaccaaagggaagatgaagatggcatggctaatgaagatgagttagacaacacctacactgggtcaggggatgaggacgccctatctgaagaggatgatgagttaggcgaagctgctaagtatgaagacgtgaaagaatgtggaaaacatgtagaaagagctctcctagtggaacttaataaaataagtctcaaggaagaaaatgtatgtgaagaaaattcacctgtggatcagtctgattttttttatgaattcagtaaacttatcttcaccaaaggcaagtctcctacggtagtgtgcagcttatgcaaacgagagggtcatctaaagaaggactgtcctgaagacttcaaaagaatccagctagaacctctgccaccattaacacccaagtttttaaatatcttagatcaagtctgtatccagtgttataaggatttttctccaacaattatagaagatcaggctcgtgaacatattcggcaaaacctagaaagtttcataagacaggactttccaggaactaaattgagcctgtttggctcctccaaaaatggatttgggttcaaacagagtgaccttgacgtctgtatgacaattaatggacttgaaactgctgagggattggactgtgtcagaactattgaagaattagcaagagtcctcagaaaacattcaggtctgagaaacatcttacctattacaacagcaaaggtgccaattgtgaagttcttccatttgagaagtggtctggaagtagatatcagtttgtataacacattggcccttcataacacaaggcttttatctgcttattccgccattgatcccagagtgaagtatttgtgctataccatgaaagtatttacaaagatatacaaaggtgaaaagaaacctgaaatatttgttgatggctggaatatttatttttttgatcaaatagatgaactgcctacctattggtcagaatgtggaaaaaatacagaatctgttgggcagttatggttgggccttcttcgtttctacacagaggaatttgattttaaagaacatgttattagcatcaggagaaaaagtctgcttacaacttttaagaaacagtggacctcaaaatacattgttattgaagatccctttgatttgaatcataatcttggagctggattatcaaggaaaatgacaaattttataatgaaggcttttatcaatggtagaagagtatttggtattcctgtcaagggatttccaaaggactacccctcaaaaatggaatacttttttgatccagatgtgttaactgaaggagagctggccccaaatgatagatgttgtcgaatttgtggaaaaatcggacacttcatgaaggactgtcctatgaggagaaaagtaagacggcggcgagatcaggaagatgccctgaaccaaagataccctgagaacaaggaaaaaagaagcaaagaggacaaagaaattcacaacaagtacacagaaagggaggtgtcaacaaaagaagataagcccatacagtgcacacctcagaaagccaagccaatgcgggcagctgctgacctggggagggagaagatcctcaggccaccagtagaaaaatggaagagacaggatgacaaagacttaagagaaaaacgttgttttatttgtggaagagaagggcacattaaaaaggaatgcccacagtttaaaggctcttcaggtagcctttccagtaaatatatgactcagggaaaagcctcagcgaagaggacccagcaggaatcatgagggaaggaaaatgcagcactctaaatggccactcaggcgttcctattcactcggaaaattaggttcatttcacaggacacagcagtgtagatcaggcttcaacttaacatttaagggaaatgtcagatttttttttaatttaatgaaattgttaatgaggaaaaatttttaatatagtcttatctaccacacatccccatagatttaaggattttaatagaaagtcatgatgtatgtatttaagccacgttaaaagaaaaaatataactatggaccggtattcagtgaatacagtttcatggtttttaattctttcaaagcacattaaaaatggtgtgctgataaaccccaagtaaattaaccctttttccgtataaatccattttttgttttgaagaggggaaattatatttattgttgtttactgaatcctggtgtgaaagcatatcagatatgtatgaactgctactgctgtacttccgatttacggacatcattttattgctatttgtagacgtgataacatgaacatgagtacctatttatgtgggccttcagtggatgggcagtgccactcaggtctctggggtttccctctctaattttaagtaaattgacatataactactatgcttataaaaatgaagtaaggaaaacaagtagtcctgtttgccactaaaaacattttcaaaggaaaaataaaatgaaagtactttttactttttatgatactcagaaattaggatgaagaacttttaaaattgctgaagatcaaagaggttatctctgccagtcacaagtgtggctggtgtcattctgggtctgactggagccctcctggactgtttctttaatttcaaaagccctgcagacatagtacctggtcagaactatgcctcggtttatttatcattttgaaataaaatcaaaatttcaacctgt

SEQ ID NO: 113 - protein, 1456 aa, Homo sapiens
MGDTAKPYFVKRTKDRGTMDDDDFRRGHPQQDYLIIDDHAKGHGSKMEKGLQKKKITPGNYGNTPRKGPCAVSSNPYAFKNPIYSQPAWMNDSHKDQSKRWLSDEHTGNSDNWREFKPGPRIPVINRQRKDSFQENEDGYRWQDTRGCRTVRRLFHKDLTSLETTSEMEAGSPENKKQRSRPRKPRKTRNEENEQDGDLEGPVIDESVLSTKELLGLQQAEERLKRDCIDRLKRRPRNYPTAKYTCRLCDVLIESIAFAHKHIKEKRHKKNIKEKQEEELLTTLPPPTPSQINAVGIAIDKVVQEFGLHNENLEQRLEIKRIMENVFQHKLPDCSLRLYGSSCSRLGFKNSDVNIDIQFPAIMSQPDVLLLVQECLKNSDSFIDVDADFHARVPVVVCREKQSGLLCKVSAGNENACLTTKHLTALGKLEPKLVPLVIAFRYWAKLCSIDRPEEGGLPPYVFALMAIFFLQQRKEPLLPVYLGSWIEGFSLSKLGNFNLQDIEKDVVIWEHTDSAAGDTGITKEEAPRETPIKRGQVSLILDVKHQPSVPVGQLWVELLRFYALEFNLADLVISIRVKELVSRELKDWPKKRIAIEDPYSVKRNVARTLNSQPVFEYILHCLRTTYKYFALPHKITKSSLLKPLNAITCISEHSKEVINHHPDVQTKDDKLKNSVLAQGPGATSSAANTCKVQPLTLKETAESFGSPPKEEMGNEHISVHPENSDCIQADVNSDDYKGDKVYHPETGRKNEKEKVGRKGKHLLTVDQKRGEHVVCGSTRNNESESTLDLEGFQNPTAKECEGLATLDNKADLDGESTEGTEELEDSLNHFTHSVQGQTSEMIPSDEEEEDDEEEEEEEEPRLTINQREDEDGMANEDELDNTYTGSGDEDALSEEDDELGEAAKYEDVKECGKHVERALLVELNKISLKEENVCEENSPVDQSDFFYEFSKLIFTKGKSPTVVCSLCKREGHLKKDCPEDFKRIQLEPLPPLTPKFLNILDQVCIQCYKDFSPTIIEDQAREHIRQNLESFIRQDFPGTKLSLFGSSKNGFGFKQSDLDVCMTINGLETAEGLDCVRTIEELARVLRKHSGLRNILPITTAKVPIVKFFHLRSGLEVDISLYNTLALHNTRLLSAYSAIDPRVKYLCYTMKVFTKIYKGEKKPEIFVDGWNIYFFDQIDELPTYWSECGKNTESVGQLWLGLLRFYTEEFDFKEHVISIRRKSLLTTFKKQWTSKYIVIEDPFDLNHNLGAGLSRKMTNFIMKAFINGRRVFGIPVKGFPKDYPSKMEYFFDPDVLTEGELAPNDRCCRICGKIGHFMKDCPMRRKVRRRRDQEDALNQRYPENKEKRSKEDKEIHNKYTEREVSTKEDKPIQCTPQKAKPMRAAADLGREKILRPPVEKWKRQDDKDLREKRCFICGREGHIKKECPQFKGSSGSLSSKYMTQGKASAKRTQQES

SEQ ID NO: 114 - DNA, 2643 bp, Homo sapiens
taaaataaatagggctttagttcttaagtaattctataggattttaccctgaaatccagggtgttcagatttcaaaaaggataatttatcagtattttctcatccagtcaaacttcagctgacattgatacaggtcaaaatgcgtagatgctttttggtgttggaaataagtgtctgtcttatggtcatcattgtcttcttagatttttggataggggggccaggtagggggagactcagaaataaaagcgttccccagataacttcaatctggaaagaattttttgtatagagtccatctctccctcaagactgaccacaggtttcatgagaaggtccctgaaaacatcacatttctctgaagaaccatcaacttgtcttttcttgaaccacaggaatggttctacagaccctactataattcttcacatttcagaacccatgtttaatggagggaagagagaaatgcatgggaaaagaacacctccttttctcctttctcttaaattcaaagacgtttgctttggaatgccctcacttctccctattcacaggcttctaaaatcattaatttactcaaggcacatgtgccttctttgccccaaatgcatcactttccttttagttatggctgattttgggtgtgtgtgtgtaagacatgcagtcaacaacgagatgaaggccattgcatagatctcatgcagatagtgatggattcagaaagtaggttccagtggcgtcactaccttcttgtaagccagtatacactggctatttgtggaaatctctttgggagatcaaatagagtattatgccactgtgagtgtttataaactggaaggaacaagtacctgtgtttcttgggacacaaagcactcagatcctgagtggatgcagacatgagagtaaatgtcagcccaaattaggcccctcgacctacagacatttcatgggttttatttaatcacaccccatggtttggggctacatgaggaagttggtaatgagctgaatttcttattcagtggaaaaaactgaaactgtctaaaaacacgggatatattttagaggcaattgtggaagcggagagaatgagatgatggtgttcagagggaccagcttctttttcagttgtctttagaactcaagaataatcaataatttagtgccccttcaacagccatactcagcaagaagaatcagaagcttgatcctctaacagaaatagaagagggtagctttgcccattgccactgtctttactgccccttctgcccctccacccacatccacattcagcatcactccaaggatgtgtcagcatcttgcccatgcaggtagaaatttgtgagtaggcctccatacttcctcgggggaagaaagagaaactagtgctggttttaagaatgtagctggcttttcatcagaacccttacgctaacctgaccacacttgctctcggggaagttcaagcctgtgatgtgcataaactccaacaagcctggctttggtgttcagcatgcacattccataaatatctcttgcaggcataccccacagctagactgcaggattaaaataacttccaaaaggtgctggattggagtttgttcaaatttctcattaaccactaatgttaattcataccaaatgcaaagtattctaaaccagctgatgctgtcagtgttcaagttttaagtgacttcaaacacaatggaagtgtttcaatgggagccagatctcatgagtaaaaatccattttataatagctctgtgatatatcagtgggagatgattcataggggagagatttgaacaagcagaattaagtgttagcaaaaatgctgcattgctttgattcatgtttaaagacctaaatttctatgcacaaggaataaagggcctacttaccaagtgtaaatcacaacataggctaccaaaatatttcttatttgctaggagaacaaagctgtcacggtgcatgatagttggacagagatggctaaaaaagaggcaaattcagatttggaaacagggtggcctcttcattatttattgccaagatctgaaaatcttcaacatcttataagacaacaatgaagtagcccctgaacagcatggagttgctgtgagtttgttcgttgcagacctttgtgttgggtcctgggaatctgagctttgttccctgtgcatggtggataattgaaaccaagaggacatgggatagaccttgtgacagaccaattctgtgacccctgtcttctgggtcacattattcattgttgatttaaatacaggactaccaaacagtacaaatctatcatgagtctggtagaaaagtaaaagtaaaagctgcacacgttacatactgtttattgttctaatgtacaactaactatttgcatataatgtgatttaatttattgctgttttgtgtagaaaaggagaactaatgactgtggatataacccatgttttgtataatatattttatttcttgtgcgaactggtcatttaaaatatctacttcatttgatgtttggatataaatgtgtatgtgtccttgtaaatgtttctatcaagcaagaatgccacgtactcagagtataacaatgtgttctcattaaaaaatacatcccacgg

SEQ ID NO: 115 - protein, 121 aa, Homo sapiens
MRRSLKTSHFSEEPSTCLFLNHRNGSTDPTIILHISEPMFNGGKREMHGKRTPPFLLSLKFKDVCFGMPSLLPIHRLLKSLIYSRHMCLLCPKCITFLLVMADFGCVCVRHAVNNEMKAIA

SEQ ID NO: 116 - DNA, 1513 bp, Homo sapiens
attcacttctcacaaggactgggtgaagagttctgcagccttacagagactggaaaagaagcccaaaccaaggcccccagagaggtcccccaggcccctttgggtccctgagcctcagctggaggtggggggtgcctgcagtgcgctggctcagtctccttctgaaaagctggatccagcttgtttgaagcccttgagctgatcttagatccggcgcaggagaccaacgcctgccatgctgttccggctctcagagcactcctcaccagaggaggaagcctccccccaccagagagcctcaggagaggggcaccatctcaagtcgaagagacccaacccctgtgcctacacaccaccttcgctgaaagctgtgcagcgcattgctgagtctcacctgcagtctatcagcaatttgaatgagaaccaggcctcagaggaggaggatgagctgggggagcttcgggagctgggttatccaagagaggaagatgaggaggaagaggaggatgatgaagaagaggaagaagaagaggacagccaggctgaagtcctgaaggtcatcaggcagtctgctgggcaaaagacaacctgtggccagggtctggaagggccctgggagcgcccaccccctctggatgagtccgagagagatggaggctctgaggaccaagtggaagacccagcactaagtgagcctggggaggaacctcagcgcccttccccctctgagcctggcacataggcacccagcctgcatctcccaggaggaagtggaggggacatcgctgttccccagaaacccactctatcctcaccctgttttgtgctcttcccctcgcctgctagggctgcggcttctgacttctagaagactaaggctggtctgtgtttgcttgtttgcccacctttggctgatacccagagaacctgggcacttgctgcctgatgcccacccctgccagtcattcctccattcacccagcgggaggtgggatgtgagacagcccacattggaaaatccagaaaaccgggaacagggatttgcccttcacaattctactccccagatcctctcccctggacacaggagacccacagggcaggaccctaagatctggggaaaggaggtcctgagaaccttgaggtacccttagatccttttctacccactttcctatggaggattccaagtcaccacttctctcaccggcttctaccagggtccaggactaaggcgtttttctccatagcctcaacattttgggaatcttcccttaatcacccttgctcctcctgggtgcctggaagatggactggcagagacctctttgttgcgttttgtgctttgatgccaggaatgccgcctagtttatgtccccggtggggcacacagcggggggcgccaggttttccttgtcccccagctgctctgcccctttccccttcttccctgactccaggcctgaacccctcccgtgctgtaataaatctttgtaaataacaaaaaaaaaaa

SEQ ID NO: 117 - protein, 168 aa, Homo sapiens
MLFRLSEHSSPEEEASPHQRASGEGHHLKSKRPNPCAYTPPSLKAVQRIAESHLQSISNLNENQASEEEDELGELRELGYPREEDEEEEEDDEEEEEEEDSQAEVLKVIRQSAGQKTTCGQGLEGPWERPPPLDESERDGGSEDQVEDPALSEPGEEPQRPSPSEPGT

SEQ ID NO: 118 - DNA, 2747 bp, Homo sapiens
gaagtgggttccggtggtggcagaggtgcttgtgtttttgtcggtacaggagagtcgctatggcggcggtggattcggatgtcgaatcgctgccgcgtggggggttccgctgctgcctctgccacgttactacagccaaccgacccagccttgatgcccacttgggaggcagaaagcaccggcacctggtagaactacgagctgcgagaaaggcccagggacttcgaagtgtgtttgtcagtggctttcccaggggtgtggattctgctcagctctctgagtacttcctagcatttgggcctgtggccagtgttgtcatggacaaggacaagggagtgtttgccattgtggagatgggggacgtgggtgctcgagaggctgtcttgtcacagtcccagcacagcctgggaggacatcgcctgcgtgtccgcccacgggagcagaaggagttccagagcccggcctccaaatcccccaaaggagcggcccccgacagtcaccagctggccaaagcgctagctgaggctgcagacgtgggggcacaaatgataaagcttgtggggctgagggagttgtccgaggccgagcggcagcttcgcagcctagtggtggccctgatgcaggaggtcttcacagagttcttccctggctgtgtggtccacccttttggctcttccataaatagcttcgatgtccatggctgtgatcttgacctcttcttggatctgggtgacttggaagagccccagccagtcccaaaggctccagaatctccatcgctggactcggccctggcttccccactggaccctcaagccctggcctgcaccccagcttcccctccagattcacaacctcctgcttctccccaggattctgaagccctggactttgaaaccccttcctcctccctggcgccccaaactccggactctgccttggcctccgagacccttgcttctccccagtctctgcctccagcttcaccactgctagaggacagggaagagggggacctggggaaggcctcggaactagcagagaccccaaaggaggagaaagcagagggggcagcaatgctggagctggtgggatccattctccggggctgtgtccctggggtgtatcgagtccaaactgtgccctctgcccggcgccctgtggtcaagttctgtcatcggccttcaggtctccacggtgatgtctccctcagtaaccggctggccctgcataactcccgtttcctgagtctctgctctgagctggatggtcgagtccggcccctcgtgtacaccctccgctgctgggctcagggtcgggggctgtcagggagtggcccccttctcagtaactacgccctgaccttgctggtgatctattttcttcagaccagggaccctcctgtgttgcccactgtgtcccagctcacccagaaagcaggagagggggaacaggtggaagtcgatggctgggactgcagtttccccagggatgcctcaagactggagcccagcataaatgtggagcccctcagttccctgctagcccagttcttctcctgtgtatcttgttgggatcttcgtggctccctgctgtccctgcgggagggtcaggcactgcctgtggcagggggcctgccttctaatctctgggagggtctgcgccttggccccctgaatctccaggacccttttgacctgagtcacaatgtcgcagccaatgtgaccagccgggtggctgggcgcctacagaactgctgccgagcagcagccaattactgccgaagcctccagtaccagcgccgttcctcccggggtcgggactgggggctgctccctcttctgcagcccagctcccccagctccctgctctctgctacgccgatccctttaccccttgcacccttcacccagctcactgctgccctggtgcaggtattcagggaagcactggggtgccatatagaacaggcaaccaagagaacgcggtcagaaggaggtggaactggggagtcctctcagggagggacaagcaaaagactcaaagtagatggacagaaaaactgctgtgaggaggggaaagaggagcagcagggatgtgcaggggacggtggggaagacagggtagaagagatggttatagaggttggagagatggtgcaggactgggccatgcagagccctgggcagccaggggacctgcccctgaccactggaaagcatggagcccctggagaagaggggcagcccagccacgcagccctggcagagcgggggcccaagggacatgaggcagcccaagaatggtctcagggtgaggcagggaagggggcatccctgccctcctcagcgagctggcgctgtgccttgtggcaccgagtgtggcaagggcggcggcgagcccgtagacgcttgcagcagcaaaccaaggagggagctggaggtggcgctggcacaagagcagggtggctggcgactgaggctcaggtcacccaggagctgaaaggactgagtggtggcgaagagaggccagaaactgagcccctgctgagctttgtggcgtctgtctccccggctgaccgaatgctcactgtgaccccgctccaggatccccaaggcctgttccctgatctccatcatttcttacaggttttcctccctcaagcaattcgacatctcaagtgaagacatggcccctgaagggcaataaagctgctagtttattaatacaaaaaaaaaaaaaaaaaa

SEQ ID NO: 119 - protein, 874 aa, Homo sapiens
MAAVDSDVESLPRGGFRCCLCHVTTANRPSLDAHLGGRKHRHLVELRAARKAQGLRSVFVSGFPRGVDSAQLSEYFLAFGPVASVVMDKDKGVFAIVEMGDVGAREAVLSQSQHSLGGHRLRVRPREQKEFQSPASKSPKGAAPDSHQLAKALAEAADVGAQMIKLVGLRELSEAERQLRSLVVALMQEVFTEFFPGCVVHPFGSSINSFDVHGCDLDLFLDLGDLEEPQPVPKAPESPSLDSALASPLDPQALACTPASPPDSQPPASPQDSEALDFETPSSSLAPQTPDSALASETLASPQSLPPASPLLEDREEGDLGKASELAETPKEEKAEGAAMLELVGSILRGCVPGVYRVQTVPSARRPVVKFCHRPSGLHGDVSLSNRLALHNSRFLSLCSELDGRVRPLVYTLRCWAQGRGLSGSGPLLSNYALTLLVIYFLQTRDPPVLPTVSQLTQKAGEGEQVEVDGWDCSFPRDASRLEPSINVEPLSSLLAQFFSCVSCWDLRGSLLSLREGQALPVAGGLPSNLWEGLRLGPLNLQDPFDLSHNVAANVTSRVAGRLQNCCRAAANYCRSLQYQRRSSRGRDWGLLPLLQPSSPSSLLSATPIPLPLAPFTQLTAALVQVFREALGCHIEQATKRTRSEGGGTGESSQGGTSKRLKVDGQKNCCEEGKEEQQGCAGDGGEDRVEEMVIEVGEMVQDWAMQSPGQPGDLPLTTGKHGAPGEEGQPSHAALAERGPKGHEAAQEWSQGEAGKGASLPSSASWRCALWHRVWQGRRRARRRLQQQTKEGAGGGAGTRAGWLATEAQVTQELKGLSGGEERPETEPLLSFVASVSPADRMLTVTPLQDPQGLFPDLHHFLQVFLPQAIRHLK

SEQ ID NO: 120 - DNA, 3776 bp, Homo sapiens
gctgatggatcagtgagcctgtgttcatgccagtgagctgctgtggctcagatactgatactttctttccaaacagcataagaagtgattgagccacaagtatactgaaggaagggctccctcgagttgtggtgtgaagagataaatcaccagtcacagactatgcacccgactgctgctgttcagtccagggaaaatgaaagttggagtgctgtggctcatttctttcttcaccttcactgacggccacggtggcttcctggggaaaaatgatggcatcaaaacaaaaaaagaactcattgtgaataagaaaaaacatctaggcccagtcgaagaatatcagctgctgcttcaggtgacctatagagattccaaggagaaaagagatttgagaaattttctgaagctcttgaagcctccattattatggtcacatgggctaattagaattatcagagcaaaggctaccacagactgcaacagcctgaatggagtcctgcagtgtacctgtgaagacagctacacctggtttcctccctcatgccttgatccccagaactgctaccttcacacggctggagcactcccaagctgtgaatgtcatctcaacaacctcagccagagtgtcaatttctgtgagagaacaaagatttggggcactttcaaaattaatgaaaggtttacaaatgaccttttgaattcatcttctgctatatactccaaatatgcaaatggaattgaaattcaacttaaaaaagcatatgaaagaattcaaggttttgagtcggttcaggtcacccaatttcgaaatggaagcatcgttgctgggtatgaagttgttggctccagcagtgcatctgaactgctgtcagccattgaacatgttgccgagaaggctaagacagcccttcacaagctgtttccattagaagacggctctttcagagtgttcggaaaagcccagtgtaatgacattgtctttggatttgggtccaaggatgatgaatataccctgccctgcagcagtggctacaggggaaacatcacagccaagtgtgagtcctctgggtggcaggtcatcagggagacttgtgtgctctctctgcttgaagaactgaacaagaatttcagtatgattgtaggcaatgccactgaggcagctgtgtcatccttcgtgcaaaatctttctgtcatcattcggcaaaacccatcaaccacagtggggaatctggcttcggtggtgtcgattctgagcaatatttcatctctgtcactggccagccatttcagggtgtccaattcaacaatggaggatgtcatcagtatagctgacaatatccttaattcagcctcagtaaccaactggacagtcttactgcgggaagaaaagtatgccagctcacggttactagagacattagaaaacatcagcactctggtgcctccgacagctcttcctctgaatttttctcggaaattcattgactggaaagggattccagtgaacaaaagccaactcaaaaggggttacagctatcagattaaaatgtgtccccaaaatacatctattcccatcagaggccgtgtgttaattgggtcagaccaattccagagatcccttccagaaactattatcagcatggcctcgttgactctggggaacattctacccgtttccaaaaatggaaatgctcaggtcaatggacctgtgatatccacggttattcaaaactattccataaatgaagttttcctatttttttccaagatagagtcaaacctgagccagcctcattgtgtgttttgggatttcagtcatttgcagtggaacgatgcaggctgccacctagtgaatgaaactcaagacatcgtgacgtgccaatgtactcacttgacctccttctccatattgatgtcaccttttgtcccctctacaatcttccccgttgtaaaatggatcacctatgtgggactgggtatctccattggaagtctcattttatgcctgatcatcgaggctttgttttggaagcagattaaaaaaagccaaacctctcacacacgtcgtatttgcatggtgaacatagccctgtccctcttgattgctgatgtctggtttattgttggtgccacagtggacaccacggtgaacccttctggagtctgcacagctgctgtgttctttacacacttcttctacctctctttgttcttctggatgctcatgcttggcatcctgctggcttaccggatcatcctcgtgttccatcacatggcccagcatttgatgatggctgttggattttgcctgggttatgggtgccctctcattatatctgtcattaccattgctgtcacgcaacctagcaatacctacaaaaggaaagatgtgtgttggcttaactggtccaatggaagcaaaccactcctggcttttgttgtccctgcactggctattgtggctgtgaacttcgttgtggtgctgctagttctcacaaagctctggaggccgactgttggggaaagactgagtcgggatgacaaggccaccatcatccgcgtggggaagagcctcctcattctgactcctctgctagggctcacctggggctttggaataggaacaatagtggacagccagaatctggcttggcatgttatttttgctttactcaatgcattccagggattttttatcttatgctttggaatactcttggacagtaagctgcgacaacttctgttcaacaagttgtctgccttaagttcttggaagcaaacagaaaagcaaaactcatcagatttatctgccaaacccaaattctcaaagtctttcaacccactgcaaaacaaaggccattatgcattttctcatactggagattcctccgacaacatcatgctaactcagtttgtctcaaatgaataaggcaaggaatcataaaatcaagaaaaaatttccagaacaacttgacatttagagacaaatgtcaatgaagaaattatgctcagtattcgatcgggttttctgatttaggggtctgggaataaaacaagaatgtctcagtggcttcattactgctcccttttgtcttcaattaaatgaaaagaagatttatttccatgtgatttgattcaaagaaagtgctccataaatgcagaagagtaggttttgttggaaatcgtgtcagttgtaccctgaccataaaatatggtttctattttcataaaacagcattattcacatggcatttccaataatctggattgaaggaagaaaattttatgaaatagctttagataaattaataggccacgttcattttcttgtcaaaaagttactggtggggggatggtgggaaaaagttattagtgcaaatttcctagagaaaaaaccatttctctttcaaattttccagttgaattttatgttcgcttttgcttcttaggttctatcacttaatattgaaagttaatcagaaataaaatgtaaacttctatttcagatagctttgtaaccatttatcagaaagtataataatgtgatatgatatataatgtggtatttttcagtttacaaggcacttccatctggtcctaaaccctgcaaacaaaagtgtcaaggcagacctagtgcagagatgagggcatgggggctcagagaggtaaagtgacttgccaaagattgtgaagccagttaagggaaattggggatttttaggacatttgtctcccagaccatttctacagccaataaaagccttgaaaattaaaaa

SEQ ID NO: 121 - protein, 910 aa, Homo sapiens
MKVGVLWLISFFTFTDGHGGFLGKNDGIKTKKELIVNKKKHLGPVEEYQLLLQVTYRDSKEKRDLRNFLKLLKPPLLWSHGLIRIIRAKATTDCNSLNGVLQCTCEDSYTWFPPSCLDPQNCYLHTAGALPSCECHLNNLSQSVNFCERTKIWGTFKINERFTNDLLNSSSAIYSKYANGIEIQLKKAYERIQGFESVQVTQFRNGSIVAGYEVVGSSSASELLSAIEHVAEKAKTALHKLFPLEDGSFRVFGKAQCNDIVFGFGSKDDEYTLPCSSGYRGNITAKCESSGWQVIRETCVLSLLEELNKNFSMIVGNATEAAVSSFVQNLSVIIRQNPSTTVGNLASVVSILSNISSLSLASHFRVSNSTMEDVISIADNILNSASVTNWTVLLREEKYASSRLLETLENISTLVPPTALPLNFSRKFIDWKGIPVNKSQLKRGYSYQIKMCPQNTSIPIRGRVLIGSDQFQRSLPETIISMASLTLGNILPVSKNGNAQVNGPVISTVIQNYSINEVFLFFSKIESNLSQPHCVFWDFSHLQWNDAGCHLVNETQDIVTCQCTHLTSFSILMSPFVPSTIFPVVKWITYVGLGISIGSLILCLIIEALFWKQIKKSQTSHTRRICMVNIALSLLIADVWFIVGATVDTTVNPSGVCTAAVFFTHFFYLSLFFWMLMLGILLAYRIILVFHHMAQHLMMAVGFCLGYGCPLIISVITIAVTQPSNTYKRKDVCWLNWSNGSKPLLAFVVPALAIVAVNFVVVLLVLTKLWRPTVGERLSRDDKATIIRVGKSLLILTPLLGLTWGFGIGTIVDSQNLAWHVIFALLNAFQGFFILCFGILLDSKLRQLLFNKLSALSSWKQTEKQNSSDLSAKPKFSKSFNPLQNKGHYAFSHTGDSSDNIMLTQFVSNE

SEQ ID NO: 122 - DNA, 2462 bp, Homo sapiens
gctgagctgcaggcgcggcgaaacttccctctacccgcccggcccgcggcgcgcaccgttggcgctggacgcttcctccttggaagcgccctctccctcagtcatggagaaaacttgtatagatgcacttcctcttactatgaattcttcagaaaagcaagagactgtatgtatttttggaactggtgattttggaagatcactgggattgaaaatgctccagtgtggttattctgttgtttttggaagtcgaaacccccagaagaccaccctactgcccagtggtgcagaagtcttgagctattcagaagcagccaagaagtctgacatcataatcatagcaatccacagagagcattatgattttctcacagaattaactgaggttctcaatggaaaaatattggtagacatcagcaacaacctcaaaatcaatcaatatccagaatctaatgcagagtaccttgctcatttggtgccaggagcccacgtggtaaaagcatttaacaccatctcagcctgggctctccagtcaggagcactggatgcaagtcggcaggtgtttgtgtgtggaaatgacagcaaagccaagcaaagagtgatggatattgttcgtaatcttggacttactccaatggatcaaggatcactcatggcagccaaagaaattgaaaagtaccccctgcagctatttccaatgtggaggttccccttctatttgtctgctgtgctgtgtgtcttcttgtttttctattgtgttataagagacgtaatctacccttatgtttatgaaaagaaagataatacatttcgtatggctatttccattccaaatcgtatctttccaataacagcaccttacactgcttgctttggtttacctccctggtgttattgctgccattctacaactgtaccgaggcacaaaataccgtcgattcccagactggcttgaccactggatgctttgccgaaagcagcttggcttggtagctctgggatttgccttccttcatgtcctctacacacttgtgattcctattcgatattatgtacgatggagattgggaaacttaaccgttacccaggcaatactcaagaaggagaatccatttagcacctcctcagcctggctcagtgattcatatgtggctttgggaatacttgggttttttctgtttgtactcttggggaatcacttctttgccatctgttagcaatgcagtcaactggagagagttccgatttgtccagtccaaactgggttatttgaccctgatcttgtgtacagcccacaccctggtgtacggtgggaagagattcctcagcccttcaaatctcagatggtatcttcctgcagcctacgtgttagggcttatcattccttgcactgtgctggtgatcaagtttgtcctaatcatgccatgtgtagacaacacccttacaaggatccgccagggctgggaaaggaactcaaaacactagaaaaagcattgaatggaaaatcaatatttaaaacaaagttcaatttagctggatttctgaactatggttttgaatgtttaaagaagaatgatgggtacagttaggaaagtttttttcttacaccgtgactgagggaaacattgcttgtctttgagaaattgactgacatactggaagagaacaccattttatctcaggttagtgaagaatcagtgcaggtccctgactcttattttcccagaggccatggagctgagattgagactagccttgtggtttcacactaaagagtttccttgttatgggcaacatgcatgacctaatgtcttgcaaaatccaatagaagtattgcagcttccttctctggctcaagggctgagttaagtgaaaggaaaaacagcacaatggtgaccactgataaaggctttattaggtatatctgaggaagtgggtcacatgaaatgtaaaaagggaatgaggtttttgttgttttttggaagtaaaggcaaacataaatattaccatgatgaattctagtgaaatgaccccttgactttgcttttcttaatacagatatttactgagaggaactatttttataacacaagaaaaatttacaattgattaaaagtatccatgtcttggatacatacgtatctatagagctggcatgtaattcttcctctataaagaataggtataggaaagactgaataaaaatggagggatatccccttggatttcacttgcattgtgcaataagcaaagaagggttgataaaagttcttgatcaaaaagttcaaagaaaccagaattttagacagcaagctaaataaatattgtaaaattgcactatattaggttaagtattatttaggtattataatatgctttgtaaattttatattccaaatattgctcaatatttttcatctattaaattaatttctagtgtaaaaaaaaaaaaaaaaaaaaaa

SEQ ID NO: 123 - protein, 283 aa, Homo sapiens
MEKTCIDALPLTMNSSEKQETVCIFGTGDFGRSLGLKMLQCGYSVVFGSRNPQKTTLLPSGAEVLSYSEAAKKSDIIIIAIHREHYDFLTELTEVLNGKILVDISNNLKINQYPESNAEYLAHLVPGAHVVKAFNTISAWALQSGALDASRQVFVCGNDSKAKQRVMDIVRNLGLTPMDQGSLMAAKEIEKYPLQLFPMWRFPFYLSAVLCVFLFFYCVIRDVIYPYVYEKKDNTFRMAISIPNRIFPITAPYTACFGLPPWCYCCHSTTVPRHKIPSIPRLA

SEQ ID NO: 124 - DNA, 4471 bp, Homo sapiens
gctgagctgcaggcgcggcgaaacttccctctacccgcccggcccgcggcgcgcaccgttggcgctggacgcttcctccttggaagcgccctctccctcagtcatggagaaaacttgtatagatgcacttcctcttactatgaattcttcagaaaagcaagagactgtatgtatttttggaactggtgattttggaagatcactgggattgaaaatgctccagtgtggttattctgttgtttttggaagtcgaaacccccagaagaccaccctactgcccagtggtgcagaagtcttgagctattcagaagcagccaagaagtctgacatcataatcatagcaatccacagagagcattatgattttctcacagaattaactgaggttctcaatggaaaaatattggtagacatcagcaacaacctcaaaatcaatcaatatccagaatctaatgcagagtaccttgctcatttggtgccaggagcccacgtggtaaaagcatttaacaccatctcagcctgggctctccagtcaggagcactggatgcaagtcggcaggtgtttgtgtgtggaaatgacagcaaagccaagcaaagagtgatggatattgttcgtaatcttggacttactccaatggatcaaggatcactcatggcagccaaagaaattgaaaagtaccccctgcagctatttccaatgtggaggttccccttctatttgtctgctgtgctgtgtgtcttcttgtttttctattgtgttataagagacgtaatctacccttatgtttatgaaaagaaagataatacatttcgtatggctatttccattccaaatcgtatctttccaataacagcaccttacactgcttgctttggtttacctccctggtgttattgctgccattctacaactgtaccgaggcacaaaataccgtcgattcccagactggcttgaccactggatgctttgccgaaagcagcttggcttggtagctctgggatttgccttccttcatgtcctctacacacttgtgattcctattcgatattatgtacgatggagattgggaaacttaaccgttacccaggcaatactcaagaaggagaatccatttagcacctcctcagcctggctcagtgattcatatgtggctttgggaatacttgggttttttctgtttgtactcttggggaatcacttctttgccatctgttagcaatgcagtcaactggagagagttccgatttgtccagtccaaactgggttatttgaccctgatcttgtgtacagcccacaccctggtgtacggtgggaagagattcctcagcccttcaaatctcagatggtatcttcctgcagcctacgtgttagggcttatcattccttgcactgtgctggtgatcaagtttgtcctaatcatgccatgtgtagacaacacccttacaaggatccgccagggctgggaaaggaactcaaaacactagaaaaagcattgaatggaaaatcaatatttaaaacaaagttcaatttagctggatttctgaactatggttttgaatgtttaaagaagaatgatgggtacagttaggaaagtttttttcttacaccgtgactgagggaaacattgcttgtctttgagaaattgactgacatactggaagagaacaccattttatctcaggttagtgaagaatcagtgcaggtccctgactcttattttcccagaggccatggagctgagattgagactagccttgtggtttcacactaaagagtttccttgttatgggcaacatgcatgacctaatgtcttgcaaaatccaatagaagtattgcagcttccttctctggctcaagggctgagttaagtgaaaggaaaaacagcacaatggtgaccactgataaaggctttattaggtatatctgaggaagtgggtcacatgaaatgtaaaaagggaatgaggtttttgttgttttttggaagtaaaggcaaacataaatattaccatgatgaattctagtgaaatgaccccttgactttgcttttcttaatacagatatttactgagaggaactatttttataacacaagaaaaatttacaattgattaaaagtatccatgtcttggatacatacgtatctatagagctggcatgtaattcttcctctataaagaataggtataggaaagactgaataaaaatggagggatatccccttggatttcacttgcattgtgcaataagcaaagaagggttgataaaagttcttgatcaaaaagttcaaagaaaccagaattttagacagcaagctaaataaatattgtaaaattgcactatattaggttaagtattatttaggtattataatatgctttgtaaattttatattccaaatattgctcaatatttttcatctattaaattaatttctagtgtaaataagtagcttctatatctgtcttagtctattataattgtaaggagtaaaattaaatgaatagtctgcaggtataaatttgaacaatgcatagatgatcgaaaattacggaaaatcatagggcagagaggtgtgaagattcatcattatgtgaaatttggatctttctcaaatccttgctgaaatttaggatggttctcactgtttttctgtgctgatagtaccctttccaaggtgaccttcagggggattaaccttcctagctcaagcaatgagctaaaaggagccttatgcatgatcttcccacatatcaaaataactaaaaggcactgagtttggcatttttctgcctgctctgctaagacctttttttttttttactttcattataacatattatacatgacattatacaaaaatgattaaaatatattaaaacaacatcaacaatccaggatatttttctataaaactttttaaaaataattgtatctatatattcaattttacatccttcttcaaaggctttgtttttctaaaggctttgttttcctttttattatttttttcttttttatttttttgagacagtcttgctctgtcgctcaggctggagtgcagtggcacgatctcagctcactgcaacctcctcctcccaggttcaagtgattcttgttcatcagcctcccgagtagctgggactacaggcatgtgccactatgcccagctaatttttgtacttttagtagagacagggtttcaccacattggtcaggctggtcttgaaatgctggcgtcaagtgatctgcctgcctccgcctcacaaagcactgggattacaggcatgaatctggccttacgtaatatattttcttaatggctgcataatatcacatcaaataggcatttttcaaacctctttccttattaaacatgtagactatatccattttttactaaaataaataacatttcagataatatctttgcactgataatgttgccaagccatttctaaagtgaccttatcaatttaattaccattggatgagggtgttgctttcatcgcaccattgtarattgtcttttttatttcaatttgcgtttatttataactggttgcaaaggtacacagaacacacgctccttcaacttatctttgataaacccaagcaaggatacaaaaagttggacgacattgagtagagtcatggtatacggtgctgaccctacagtatcagtggaaaagataaggaaaatgtcactactcacctatgttatgcaaaacagttaggtgtgctggggctggatactgctcttttacttgagcattggttgattaaagtttaggtaccatccaggctggtctagagaagtctttggagttaaccatgctctttttgttaaagaagagagtaatgtgtttatcctggctcatagtccgtcaccgaaaatagaaaatgccatccataggtaaaatgctgacctatagaaaaaaatgaactctacttttatagcctagtaaaaatgctctacctgagtagttaaaagcaattcatgaagcctgaagctaaagagcactctgatggttttggcataatagctgcatttccagacctgacctttggccccaaccacaagtgctccaagccccaccagctgaccaaagaaagcccaagttctccttctgtccttcccacaacctccctgctcccaaaactatgaaattaatttgaccatattaacacagctgactcctccagtttacttaaggtagaaagaatgagtttacaacagatgaaaataagtgctttgggcgaactgtattccttttaacagatccaaactattttacatttaaaaaaaaagttaaactaaacttctttactgctgatatgtttcctgtattctagaaaaatttttacactttcacattatttttgtacactttccccatgttaagggatgatggcttttataaatgtgtattcattaaatgttactttaaaaataaaaaaaaaaaaaaaaaa

SEQ ID NO: 125 - DNA, 3670 bp, Homo sapiens
tgcatctttatgataagtggatcaaagatgctgatccaagagttgaagattggctcctcatgtcctcgcctctgccacataccatcctcctaggattctatgtctattttgtcacttccttgtgaccaaagctcatggaaaatcgcaagccctttgaactcaagaaagcaatgataacgtacaattttttcatagtactcttttctgagtatatgtgttatgagtttgtgatgtctggctggggtataggatattcatttcgatgcgacattgttgactattcacggtcacccacagctttgaggatggcacgtacctgctggctgtattacttctgcaaatttattgagctattagatacgatcttttttgttctgcgcaagaaaaatagccaagtgactttccttcatgtattccatcataccatcatgccgtggacctggtggtttggagtcaaatttgctgcaggtggtttgggaacattccatgcccttctaaatacagctgtacatgtagtcatgtattcctactatggactttctgcattggggccagcctaccagaagtatttgtggtggaaaaaatatttgacatcattacagcttgtccagtttgttattgtcgccatccacataagccagttctttttcatggaggattgcaagtatcagtttccagtctttgcgtgcatcattatgagttacagtttcatgtttctgctgctctttctccatttttggtaccgtgcttacaccaaaggtcagaggttgcccaaaactgtgaaaaatggaacttgcaaaaacaaagataattgaagcccaacataagtctatgatcgaaactgatacattgtcttccttgacaatcaagagatatttacctatgcagtgcattttgtatatttttcaaaactaagagcttgtatttttatggtaagttattgggatgtctgatatttgagagcccgaagcttccagataacagtcttctgataattagagcctacagcagccagaatttgtttttgtttttgtttttgtttttttagctgcttttaaacctaatccaaaggttttgtttaaaacattttgttgcagtgaaaaaaagatatgaagcaatacagtactcttcaaagaagtccaataaagatgaaaaatatcattaggtattttgagcacagacggagatccatgtgataaaatagattccttctgctgggtctggaaagtctggaaaccacctgtaggccctggctttgtcatttattgactgtattcagaagatactatatttgctctagagttaactcccattttagcaagctagcacaggtgaaaattgagtgagttttygataacttgtcatttaaaatcattaatgataattttcaatggatcttttcagtagccatcaccagttttgctgataagacttcctcacaacccatttgttgtacaaactgtttcaaagtagcaatcctttgggttagtacacttgataccaagtttcattcagttgattattttcaaaacaaggtgatttgttttaatgggttaatgaatactttgctattactgttttacaattaactttgtatatctctggaaagaggtgaatttgtcaatgaaaaaagtattgtgtagttcagtgggaaaaacctgttgtctgttatagtatcacatcactttcttacattgtcatggtttaaattattatcttggtgaaatatataggttagatacttaaatgttcatattattagcacactacaggtactacccttaaatcataaataatattacccattgtacacagtttccagatatgagttagagtggctgtgaagcaactagaggcaaattgtggcacagagaatatccaggggaaaattgattatgtaagcaagggctgttctactttgagagagagacagacagactacataatagtaatatattatataattaatgttatagatacactgaacaataaaacattttctggaattatgaattaattaacaacctggatttctgtttccagacctataaaccatgtaatgaaggactgaaattcgtttggcatacactttgtttctttaaaattgctagtttctttctgttatttttacattttcttgtcagagaatcaaaactattagtcagtagagttttgtccatgaaataatatttggacatttgtgaatttttccctattttttttcttcttttatttatacctcaattttgaagcacctgtttatgtttgtaggactttaaacaattagtaccttaaagccccagttaattttgaacacacagagatactttattgtactctgtgtacagtaagtatttttatgtttacacttaccagattcataaggttatttgcctttaagtgatcttttgtgattttacttgattacagcatgagaaggtaaaggttgataaatgggagtaattacatawawawawawaawwwawwawwwwwwwwwmwraarmararttttactcttgttgcccaggctagagtgcaatggcacaatctcggttcactgcaacctctgcctcccaggttcaagtgattctcctgtctcagcctcccaagtagctgggattacaggtgcccgccaccatgctcagctaatttttgtatttttagtagagacagggttggccaggctggtctcgagctcctgacctcaggtgatcctcccacctcggcctcccaaagttctgggattacaggggtgagccactgtgcccggccataattttatatttttagaaaataaagaatgaaggacaaaagagcacagctaaatgaaactgctgctctaatttattccactggaaaggtctcaggactccttaactgttttccaggtttggctcttcatatctaacctgtgctaaaatgagaasgtatgctaggtgctgttagaaatcacaccatttccaaagaacccaagtagtatagagaccaaaatgaggcaaaaataaaagagatgaaacaggagagtttatttcttgcatactttccgaccttcatcatacaacctctcctaacctccctgtagtctttaaaatgtttaacttgcctataagctaacatgtaataaaacacatactcaattatatgaatagaagtggagagccagaatgctacaaaagaaatcacagctgctagaagtatcctccatagaaacatcaacatgattgtggatcaaaatgattttcactggatatggaatttgtatgggccatatttattaaaagagttctgtgtggtcacatagagttcctttggggatttcatcccacttttcaggacttaatttgtttggggtttgcytacctaacaagcaacaacaacaacaaaatwaataggttccmaaatctagttttattacataaatcycyatgaatccttgagggcctatatctatattataaataaatacaaatatagatttttaaatatctatgggactttgccatttacagccttaagtataaaattacgagattatattctttccattaccctttatttctgctaactttttaaagactggaacattctgtggatgttgtcaaagtttgagtttgtttttccctgtgtattataataaatttgtggtattgcaaaaaaaaaaaaaaaaaaa

SEQ ID NO: 126 - protein, 226 aa, Homo sapiens
MENRKPFELKKAMITYNFFIVLFSEYMCYEFVMSGWGIGYSFRCDIVDYSRSPTALRMARTCWLYYFCKFIELLDTIFFVLRKKNSQVTFLHVFHHTIMPWTWWFGVKFAAGGLGTFHALLNTAVHVVMYSYYGLSALGPAYQKYLWWKKYLTSLQLVQFVIVAIHISQFFFMEDCKYQFPVFACIIMSYSFMFLLLFLHFWYRAYTKGQRLPKTVKNGTCKNKDN

SEQ ID NO: 127 - DNA, 2863 bp, Homo sapiens
cggaattcaagaaacacaaaatgcagtgggcgtccctcctgctgctggcagggctcttctccctctcccaggcccagtatgaagatgaccctcattggtggttccactacctccgcagccagcagtccacctactacgatccctatgacccttacccgtatgagacctacgagccttacccctatggggtggatgaagggccagcctacacctacggctctccatcccctccagatccccgcgactgcccccaggaatgcgactgcccacccaacttcctcacggccatgtactgtgacaatcgcaacctcaagtacctgcccttcgttccctcccgcatgaagtatgtgtacttccagaacaaccagatcacctccatccaggaaggcgtctttgacaatgccacagggctgctctggattgctctccacggcaaccagatcaccagtgataaggtgggcaggaaggtcttctccaagctgaggcacctggagaggctgtacctggaccacaacaacctgacccggatgcccggtcccctgcctcgatccctgagagagctccatctcgaccacaaccagatctcacgggtccccaacaatgctctggaggggctggagaacctcacggccttgtacctccaacacgatgagatccaggaagtgggcagttccatgaggggcctccggtcactgatcttgctggacctgagttataaccaccttcggaaggtgcctgatgggctgccctcagctcttgagcagctgtacatggagcacaacaatgtctacaccgtccccgatagctacttccggggggcgcccaagctgctgtatgtgcggctgtcccacaacagtctaaccaacaatggcctggcctccaacaccttcaattccagcagcctccttgagctagacctctcctacaaccagctgcagaagatccccccagtcaacaccaacctggagaacctctacctccaaggcaataggatcaatgagttctccatcagcagcttctgcaccgtggtggacgtcgtgaacttctccaagctgcaggtcgtgcgcctggacgggaacgagatcaagcgcagcgccatgcctgccgacgcgcccctctgcctgcgccttgccagcctcatcgagatctgagcagccctggcaccgggtactgggcggagagcccccgtggcatttggcttgatggtttggtttggcttatggaagatctgggacagaccgtgtgacagaagtccacgggcaccctctgtagtcttctttcctgtaggtggggttagggggggcgatcagggacaggcagccttctgctgaggacataggcagaagctcactcttttccagggacagaagtggtggtagatggaaggatccctggatgttccaaccccataaatctcacggctcttaagttcttcccaatgatctgaggtcatggaacttcaaaagtggcatgggcaatagtatataaccatacttttctaacaatccctggctgtctgtgagcagcacttgacagctctccctctgtgctgggctggtcgtgcagttactctgggctcccatttgttgcttctcaaaatatacctcttgcccagctgcctcttctgaaatccacttcacccactccactttcctccacagatgcctcttctgtgccttaagcagagtcaggagaccccaaggcatgtgagcatctgcccagcaacctgtggagacaacccacactgtgtctgagggtgaaaggacaccaggagtcacttctatacctccctaacctcacccctggaaagccaccagattggaggtcaccagcatgatgataatattcatgacctgatgtgggaggagacagccaacctcaggcttagatcaatgtatagggctatattttggcagctgggtagctctttgaaggtggataagacttcagaagaggaaaggccagactttgcttaccatcagcatctgcaatgggccaaacacacctcaaattggctgagttgagaaagcagccccagtagttccattcttgcccagcactttctgcattccaaacagcatcctacctgggtttttatccacaaaggtagcggccacatggtttttaaagtatgagaaacacagtttgtcctctccttttatccaagcaggaagattctatatcctgatggtagagacagactccaggcagccctggacttgctagcccaaagaaggaggatgtggttaatctgtttcacctggtttgtcctaaggccatagttaaaaagtaccagctctggctggggtccgtgaagcccaggccaggcagccaaatcttgcctgtgctgggcatacaaccctctgctttcacatctctgagctatatcctcattagtgaaggtggcttttgctttatagtttggctggggagcacttaattcttcccatttcaaaaggtaatgttgcctggggcttaacccacctgccctttgggcaaggttgggacaaagccatctgggcagtcaggggcaaggactgttggaggagagttagcccaagtataggctctgcccagatgccatcacatccctgatactgtgtatgctttgaagcaccttccctgagaagggaagaggggatctttggactacgttcttggctccagacctggaatccacaaaagccaaaccagctcatttcaacaaaggagctccgatgtgaggggcaaggctgccccctgccccagggctcttcagaaagcatctgcatgtgaacaccatcatgcctttataaaggatccttattacaggaaaagcatgagtggtggctaacctgaccaataaagttattttatgattgcc

SEQ ID NO: 128 - protein, 376 aa, Homo sapiens
MQWASLLLLAGLFSLSQAQYEDDPHWWFHYLRSQQSTYYDPYDPYPYETYEPYPYGVDEGPAYTYGSPSPPDPRDCPQECDCPPNFLTAMYCDNRNLKYLPFVPSRMKYVYFQNNQITSIQEGVFDNATGLLWIALHGNQITSDKVGRKVFSKLRHLERLYLDHNNLTRMPGPLPRSLRELHLDHNQISRVPNNALEGLENLTALYLQHDEIQEVGSSMRGLRSLILLDLSYNHLRKVPDGLPSALEQLYMEHNNVYTVPDSYFRGAPKLLYVRLSHNSLTNNGLASNTFNSSSLLELDLSYNQLQKIPPVNTNLENLYLQGNRINEFSISSFCTVVDVVNFSKLQVVRLDGNEIKRSAMPADAPLCLRLASLIEI

SEQ ID NO: 129 - DNA, 2934 bp, Homo sapiens
ttctccaacccaaggaggccagacagagggacgtggtcactctctgaaaagttcaacttgagagacaaaatgcagtggacctccctcctgctgctggcagggctcttctccctctcccaggcccagtatgaagatgaccctcattggtggttccactacctccgcagccagcagtccacctactacgatccctatgacccttacccgtatgagacctacgagccttacccctatggggtggatgaagggccagcctacacctacggctctccatcccctccagatccccgcgactgcccccaggaatgcgactgcccacccaacttccccacggccatgtactgtgacaatcgcaacctcaagtacctgcccttcgttccctcccgcatgaagtatgtgtacttccagaacaaccagatcacctccatccaggaaggcgtctttgacaatgccacagggctgctctggattgctctccacggcaaccagatcaccagtgataaggtgggcaggaaggtcttctccaagctgaggcacctggagaggctgtacctggaccacaacaacctgacccggatgcccggtcccctgcctcgatccctgagagagctccatctcgaccacaaccagatctcacgggtccccaacaatgctctggaggggctggagaacctcacggccttgtacctccaacacaatgagatccaggaagtgggcagttccatgaggggcctccggtcactgatcttgctggacctgagttataaccaccttcggaaggtgcctgatgggctgccctcagctcttgagcagctgtacatggagcacaacaatgtctacaccgtccccgatagctacttccggggggcgcccaagctgctgtatgtgcggctgtcccacaacagtctaaccaacaatggcctggcctccaacaccttcaattccagcagcctccttgagctagacctctcctacaaccagctgcagaagatccccccagtcaacaccaacctggagaacctctacctccaaggcaataggatcaatgagttctccatcagcagcttctgcaccgtggtggacgtcgtgaacttctccaagctgcaggtgctgcgcctggacgggaacgagatcaagcgcagcgccatgcctgccgacgcgcccctctgcctgcgccttgccagcctcatcgagatctgagcagccctggcaccgggtactgggcggagagcccccgtggcatttggcttgatggtttggtttggcttttgctggaaggtccaggatggaccatgtgacagaagtccacgggcaccctctgtagtcttctttcctgtaggtggggttagggggggcgatcagggacaggcagccttctgctgaggacataggcagaagctcactcttttccagggacagaagtggtggtagatggaaggatccctggatgttccaaccccataaatctcacggctcttaagttcttcccaatgatctgaggtcatggaacttcaaaagtggcatgggcaatagtatataaccatacttttctaacaatccctggctgtctgtgagcagcacttgacagctctccctctgtgctgggctggtcgtgcagttactctgggctcccatttgttgcttctcaaaatatacctcttgcccagctgcctcttctgaaatccacttcacccactccactttcctccacagatgcctcttctgtgccttaagcagagtcaggagaccccaaggcatgtgagcatctgcccagcaacctgtggagacaacccacactgtgtctgagggtgaaaggacaccaggagtcacttctatacctccctaacctcacccctggaaagccaccagattggaggtcaccagcatgatgataatattcatgacctgatgtgggaggagacagccaacctcaggcttagatcaatgtatagggctatattttggcagctgggtagctctttgaaggtggataagacttcagaagaggaaaggccagactttgcttaccatcagcatctgcaatgggccaaacacacctcaaattggctgagttgagaaagcagccccagtagttccattcttgcccagcactttctgcattccaaacagcatcctacctgggtttttatccacaaaggtagcggccacatggtttttaaagtatgagaaacacagtttgtcctctccttttatccaagcaggaagattctatatcctgatggtagagacagactccaggcagccctggacttgctagcccaaagaaggaggatgtggttaatctgtttcacctggtttgtcctaaggccatagttaaaaagtaccagctctggctggggtccgtgaagcccaggccaggcagccaaatcttgcctgtgctgggcatacaaccctctgctttcacatctctgagctatatcctcattagtgaaggtggcttttgctttatagtttggctggggagcacttaattcttcccatttcaaaaggtaatgttgcctggggcttaacccacctgccctttgggcaaggttgggacaaagccatctgggcagtcaggggcaaggactgttggaggagagttagcccaagtataggctctgcccagatgccatcacatccctgatactgtgtatgctttgaagcaccttccctgagaagggaagaggggatctttggactacgttcttggctccagacctggaatccacaaaagccaaaccagctcatttcaacaaaggagctccgatgtgaggggcaaggctgccccctgccccagggctcttcagaaagcatctgcatgtgaacaccatcatgcctttataaaggatccttattacaggaaaagcatgagtggtggctaacctgaccaataaagttattttatgattgcaaataaaaaaaaaaaaaaaa

SEQ ID NO: 130 - protein, 376 aa, Homo sapiens
MQWTSLLLLAGLFSLSQAQYEDDPHWWFHYLRSQQSTYYDPYDPYPYETYEPYPYGVDEGPAYTYGSPSPPDPRDCPQECDCPPNFPTAMYCDNRNLKYLPFVPSRMKYVYFQNNQITSIQEGVFDNATGLLWIALHGNQITSDKVGRKVFSKLRHLERLYLDHNNLTRMPGPLPRSLRELHLDHNQISRVPNNALEGLENLTALYLQHNEIQEVGSSMRGLRSLILLDLSYNHLRKVPDGLPSALEQLYMEHNNVYTVPDSYFRGAPKLLYVRLSHNSLTNNGLASNTFNSSSLLELDLSYNQLQKIPPVNTNLENLYLQGNRINEFSISSFCTVVDVVNFSKLQVLRLDGNEIKRSAMPADAPLCLRLASLIEI

SEQ ID NO: 131 - DNA, 2653 bp, Homo sapiens
ctcaaaaggggccggatttccttctcctggaggcagatgttgcctctctctctcgctcggattggttcagtgcactctagaaacactgctgtggtggagaaactggaccccaggtctggagcgaattccagcctgcagggctgataagcgaggcattagtgagattgagagagactttaccccgccgtggtggttggagggcgcgcagtagagcagcagcacaggcgcgggtcccgggaggccggctctgctcgcgccgagatgtggaatctccttcacgaaaccgactcggctgtggccaccgcgcgccgcccgcgctggctgtgcgctggggcgctggtgctggcgggtggcttctttctcctcggcttcctcttcgggtggtttataaaatcctccaatgaagctactaacattactccaaagcataatatgaaagcatttttggatgaattgaaagctgagaacatcaagaagttcttatataattttacacagataccacatttagcaggaacagaacaaaactttcagcttgcaaagcaaattcaatcccagtggaaagaatttggcctggattctgttgagctagcacattatgatgtcctgttgtcctacccaaataagactcatcccaactacatctcaataattaatgaagatggaaatgagattttcaacacatcattatttgaaccacctcctccaggatatgaaaatgtttcggatattgtaccacctttcagtgctttctctcctcaaggaatgccagagggcgatctagtgtatgttaactatgcacgaactgaagacttctttaaattggaacgggacatgaaaatcaattgctctgggaaaattgtaattgccagatatgggaaagttttcagaggaaataaggttaaaaatgcccagctggcaggggccaaaggagtcattctctactccgaccctgctgactactttgctcctggggtgaagtcctatccagatggttggaatcttcctggaggtggtgtccagcgtggaaatatcctaaatctgaatggtgcaggagaccctctcacaccaggttacccagcaaatgaatatgcttataggcgtggaattgcagaggctgttggtcttccaagtattcctgttcatccaattggatactatgatgcacagaagctcctagaaaaaatgggtggctcagcaccaccagatagcagctggagaggaagtctcaaagtgccctacaatgttggacctggctttactggaaacttttctacacaaaaagtcaagatgcacatccactctaccaatgaagtgacaagaatttacaatgtgataggtactctcagaggagcagtggaaccagacagatatgtcattctgggaggtcaccgggactcatgggtgtttggtggtattgaccctcagagtggagcagctgttgttcatgaaattgtgaggagctttggaacactgaaaaaggaagggtggagacctagaagaacaattttgtttgcaagctgggatgcagaagaatttggtcttcttggttctactgagtgggcagaggagaattcaagactccttcaagagcgtggcgtggcttatattaatgctgactcatctatagaaggaaactacactctgagagttgattgtacaccgctgatgtacagcttggtacacaacctaacaaaagagctgaaaagccctgatgaaggctttgaaggcaaatctctttatgaaagttggactaaaaaaagtccttccccagagttcagtggcatgcccaggataagcaaattgggatctggaaatgattttgaggtgttcttccaacgacttggaattgcttcaggcagagcacggtatactaaaaattgggaaacaaacaaattcagcggctatccactgtatcacagtgtctatgaaacatatgagttggtggaaaagttttatgatccaatgtttaaatatcacctcactgtggcccaggttcgaggagggatggtgtttgagctagccaattccatagtgctcccttttgattgtcgagattatgctgtagttttaagaaagtatgctgacaaaatctacagtatttctatgaaacatccacaggaaatgaagacatacagtgtatcatttgattcacttttttctgcagtaaagaattttacagaaattgcttccaagttcagtgagagactccaggactttgacaaaagcaacccaatagtattaagaatgatgaatgatcaactcatgtttctggaaagagcatttattgatccattagggttaccagacaggcctttttataggcatgtcatctatgctccaagcagccacaacaagtatgcaggggagtcattcccaggaatttatgatgctctgtttgatattgaaagcaaagtggacccttccaaggcctggggagaagtgaagagacagatttatgttgcagccttcacagtgcaggcagctgcagagactttgagtgaagtagcctaagaggattctttagagaatccgtattgaatttgtgtggtatgtcactcagaaagaatcgtaatgggtatattgataaattttaaaattggtatatttgaaataaagttgaatattatatataaaaaaaaaaaaaaaaaaa

SEQ ID NO: 132 - protein, 750 aa, Homo sapiens
MWNLLHETDSAVATARRPRWLCAGALVLAGGFFLLGFLFGWFIKSSNEATNITPKHNMKAFLDELKAENIKKFLYNFTQIPHLAGTEQNFQLAKQIQSQWKEFGLDSVELAHYDVLLSYPNKTHPNYISIINEDGNEIFNTSLFEPPPPGYENVSDIVPPFSAFSPQGMPEGDLVYVNYARTEDFFKLERDMKINCSGKIVIARYGKVFRGNKVKNAQLAGAKGVILYSDPADYFAPGVKSYPDGWNLPGGGVQRGNILNLNGAGDPLTPGYPANEYAYRRGIAEAVGLPSIPVHPIGYYDAQKLLEKMGGSAPPDSSWRGSLKVPYNVGPGFTGNFSTQKVKMHIHSTNEVTRIYNVIGTLRGAVEPDRYVILGGHRDSWVFGGIDPQSGAAVVHEIVRSFGTLKKEGWRPRRTILFASWDAEEFGLLGSTEWAEENSRLLQERGVAYINADSSIEGNYTLRVDCTPLMYSLVHNLTKELKSPDEGFEGKSLYESWTKKSPSPEFSGMPRISKLGSGNDFEVFFQRLGIASGRARYTKNWETNKFSGYPLYHSVYETYELVEKFYDPMFKYHLTVAQVRGGMVFELANSIVLPFDCRDYAVVLRKYADKIYSISMKHPQEMKTYSVSFDSLFSAVKNFTEIASKFSERLQDFDKSNPIVLRMMNDQLMFLERAFIDPLGLPDRPFYRHVIYAPSSHNKYAGESFPGIYDALFDIESKVDPSKAWGEVKRQIYVAAFTVQAAAETLSEVA

SEQ ID NO: 133 - DNA, 3775 bp, Homo sapiens
cattcataagactcagagctacggccacggcagggacacgcggaaccaagacttggaaacttgattgttgtggttcttcttgggggttatgaaatttcattaatcttttttttttccggggagaaagtttttggaaagattcttccagatatttcttcattttcttttggaggaccgacttactttttttggtcttctttattactcccctccccccgtgggacccgccggacgcgtggaggagaccgtagctgaagctgattctgtacagcgggacagcgctttctgcccctgggggagcaacccctccctcgcccctgggtcctacggagcctgcactttcaagaggtacagcggcatcctgtgggggcctgggcaccgcaggaagactgcacagaaactttgccattgttggaacgggacgttgctccttccccgagcttccccggacagcgtactttgaggactcgctcagctcaccggggactcccacggctcaccccggacttgcaccttacttccccaacccggccatagccttggcttcccggcgacctcagcgtggtcacaggggcccccctgtgcccagggaaatgtttcaggctttccccggagactacgactccggctcccggtgcagctcctcaccctctgccgagtctcaatatctgtcttcggtggactccttcggcagtccacccaccgccgcggcctcccaggagtgcgccggtctcggggaaatgcccggttccttcgtgcccacggtcaccgcgatcacaaccagccaggacctccagtggcttgtgcaacccaccctcatctcttccatggcccagtcccaggggcagccactggcctcccagcccccggtcgtcgacccctacgacatgccgggaaccagctactccacaccaggcatgagtggctacagcagtggcggagcgagtggcagtggtgggccttccaccagcggaactaccagtgggcctgggcctgcccgcccagcccgagcccggcctaggagaccccgagaggagacgctcaccccagaggaagaggagaagcgaagggtgcgccgggaacgaaataaactagcagcagctaaatgcaggaaccggcggagggagctgaccgaccgactccaggcggagacagatcagttggaggaagaaaaagcagagctggagtcggagatcgccgagctccaaaaggagaaggaacgtctggagtttgtgctggtggcccacaaaccgggctgcaagatcccctacgaagaggggcccgggccgggcccgctggcggaggtgagagatttgccgggctcagcaccggctaaggaagatggcttcagctggctgctgccgcccccgccaccaccgcccctgcccttccagaccagccaagacgcaccccccaacctgacggcttctctctttacacacagtgaagttcaagtcctcggcgaccccttccccgttgttaacccttcgtacacttcttcgtttgtcctcacctgcccggaggtctccgcgttcgccggcgcccaacgcaccagcggcagtgaccagccttccgatcccctgaactcgccctccctcctcgctcggtgaactctttagacacacaaaacaaacaaacacatgggggagagagacttggaagaggaggaggaggaggagaaggaggagagagaggggaagagacaaagtgggtgtgtggcctccctggctcctccgtctgaccctctgcggccactgcgccactgccatcggacaggaggattccttgtgttttgtcctgcctcttgtttctgtgccccggcgaggccggagagctggtgactttggggacagggggtgggaaggggatggacacccccagctgactgttggctctctgacgtcaacccaagctctggggatgggtggggaggggggcgggtgacgcccaccttcgggcagtcctgtgtgaggatgaagggacgggggtgggaggtaggctgtggggtgggctggagtcctctccagagaggctcaacaaggaaaaatgccactccctacccaatgtctcccacacccaccctttttttggggtgcccaggttggtttcccctgcactcccgaccttagcttattgatcccacatttccatggtgtgagatcctctttactctgggcagaagtgagcccccccttaaagggaattcgatgcccccctagaataatctcatccccccacccgacttcttttgaaatgtgaacgtccttccttgactgtctagccactccctcccagaaaaactggctctgattggaatttctggcctcctaaggctccccaccccgaaatcagcccccagccttgtttctgatgacagtgttatcccaagaccctgccccctgccagccgaccctcctggccttcctcgttgggccgctctgatttcaggcagcaggggctgctgtgatgccgtcctgctggagtgatttatactgtgaaatgagttggccagattgtggggtgcagctgggtggggcagcacacctctggggggataatgtccccactcccgaaagcctttcctcggtctcccttccgtccatcccccttcttcctcccctcaacagtgagttagactcaagggggtgacagaaccgagaagggggtgacagtcctccatccacgtggcctctctctctctcctcaggaccctcagccctggcctttttctttaaggtcccccgaccaatccccagcctaggacgccaacttctcccaccccttggcccctcacatcctctccaggaaggcagtgaggggctgtgacatttttccggagaagatttcagagctgaggctttggtacccccaaacccccaatatttttggactggcagactcaaggggctggaatctcatgattccatgcccgagtccgcccatccctgaccatggttttggctctcccaccccgccgttccctgcgcttcatctcatgaggatttctttatgaggcaaatttatattttttaatatcggggggtggaccacgccgccctccatccgtgctgcatgaaaaacattccacgtgccccttgtcgcgcgtctcccatcctgatcccagacccattccttagctatttatccctttcctggtttccgaaaggcaattatatctattatgtataagtaaatatattatatatggatgtgtgtgtgtgcgtgcgcgtgagtgtgtgagcgcttctgcagcctcggcctaggtcacgttggccctcaaagcgagccgttgaattggaaactgcttctagaaactctggctcagcctgtctcgggctgacccttttctgatcgtctcggcccctctgattgttcccgatggtctctctccctctgtcttttctcctccgcctgtgtccatctgaccgttttcacttgtctcctttctgactgtccctgccaatgctccagctgtcgtctgactctgggttcgttggggacatgagattttattttttgtgagtgagactgagggatcgtagatttttacaatctgtatctttgacaattctgggtgcgagtgtgagagtgtgagcagggcttgctcctgccaaccacaattcaatgaatccccgacccccctaccccatgctgtacttgtggttctctttttgtattttgcatctgaccccggggggctgggacagattggcaatgggccgtcccctctccccttggttctgcactgttgccaataaaaagctcttaaaaacgc

SEQ ID NO: 134 - protein, 338 aa, Homo sapiens
MFQAFPGDYDSGSRCSSSPSAESQYLSSVDSFGSPPTAAASQECAGLGEMPGSFVPTVTAITTSQDLQWLVQPTLISSMAQSQGQPLASQPPVVDPYDMPGTSYSTPGMSGYSSGGASGSGGPSTSGTTSGPGPARPARARPRRPREETLTPEEEEKRRVRRERNKLAAAKCRNRRRELTDRLQAETDQLEEEKAELESEIAELQKEKERLEFVLVAHKPGCKIPYEEGPGPGPLAEVRDLPGSAPAKEDGFSWLLPPPPPPPLPFQTSQDAPPNLTASLFTHSEVQVLGDPFPVVNPSYTSSFVLTCPEVSAFAGAQRTSGSDQPSDPLNSPSLLAR

SEQ ID NO: 135 - DNA, 2487 bp, Homo sapiens
actcagccctggcctcgccgagctctgttcttagactctcacccgtcccgcacgttcctggtcgcctggcgttctgattcgcccgcccgggccccgccaccccctcctcagctgacggggcaaaagctgctccgagaggagaaggtcaagtcctccgcccgggccgggccgagcggagcccagggagcgcagcatccgcgcggctaccgcggcggcgcaggagttataaagtcggcgcgcgagactccgccgccacccggcagccccggcgcagctccggcagccgcagtcgcagcgcccccagcgtggcgccccccggccgggcctgccgcccgggacccgggctggggcgcagagggagcccggagcccggcgcccccatgcgccgccccgccgccgccgcgccacagctatgaccctgagcactgagatgtccgatgcctctggcctcgccgaggaaacagacatcgacgtggtgggggagggcgaggacgaagaagacgaggaagaggaggacgacgacgagggcggcggtggcgggccccggctggctgtccccgcgcagcggcggcggcggcggcgctcgtacgccggggaggacgagctggaggatctggaggaggaggaggacgacgatgacatcctgctggccccgcctgctgggggctccccggcgcccccgggcccggccccggcggcgggggcaggagccggtgggggcggcggcggcggcggcgcgggcggcggcgggagcgcgggtagcggcgccaagaacccgctggtgaagccgccctactcgtatatcgcgctcatcactatggccatcctgcagagccccaagaagcggctgacgctgagcgagatctgtgagttcatcagcggccgcttcccctactaccgggagaagttccccgcctggcagaacagcatccgccacaacctctcgctcaacgactgcttcgtcaagatcccccgcgagcccggcaacccgggcaagggcaactactggacgctggacccggagtccgccgacatgttcgacaacggcagcttcctgcgccggaggaagcgcttcaagcggcagccgctgctcccacccaacgccgcggccgccgagtctctgctgctgcgcggcgcgggagccgcagggggcgcgggcgacccggcagccgccgccgcgctcttcccgcccgcgcccccgccgcccccgcatgcctacggctacggcccctacggctgcggctacggcctgcagctgccgccttacgcgccgccctcggccctcttcgccgccgcagcggccgccgccgccgccgccgccttccacccgcactcgcccccgccgcccccgccaccgcacggcgcggccgccgagctggcccggaccgccttcggctaccggccgcacccgctcggcgccgccctacccggccccctgccggcctccgcggccaaggcgggcggcccgggcgcctcagcgctggcgcgctcgcccttctccatcgagagcatcatcgggggcagcttgggcccggccgccgctgccgccgccgccgcgcaggccgccgccgccgctcaggcctcgccctcgccctcgccggtggcggcgccgccagctcccggatccagcggaggaggctgcgcggcgcaggcggccgtgggcccggcggccgcgctcacccgatccctcgtggccgccgcggccgccgccgcctcctcagtctcctcgtccgccgccttggggactctgcaccaagggactgccctgtccagtgtcgagaactttactgctaggatttccaattgttaataacgctatgttagcgcgctcgaggaagaaggtaggaatcccggctccttttctcgtcttggtggttcggtgttttgttcgctcctccaggcgcggcccctctcgacctcgcgcgcccattttcgccgctgcgaattctcggacaaaactgtcaacagcccgggcgcgccttttggctctgcgggtccctctatttatgcaaagccgacctatgctacagccccccaacccccgacctggggtagggaggaagagggtgccggggaagggagtccgccctgtccaggcactagaggctcccttgacgtttggcagatgaaaaacaactaagcctttttgaggtgtagagattctcaggtccaggcgttaaaaaataatggtcaaaagaataatacaaaaatagtaaaggtcttgaagaatgccagcgaagcaattcttttttatttgaggacacttgtctggtgtactttttcatgaaaaggaaaaatggttaacatgtttacacaagaaaaaaagtcaaaattatcatttatttcaacctgtgttttgtatcataacagacgtgtggatttttttgtacttactgcgtattctttacaaggagtattgtaaattttactggcaattattattgtactattctaaatgtaagatttttacactttttcagaaataaa

SEQ ID NO: 136 - protein, 465 aa, Homo sapiens
MTLSTEMSDASGLAEETDIDVVGEGEDEEDEEEEDDDEGGGGGPRLAVPAQRRRRRRSYAGEDELEDLEEEEDDDDILLAPPAGGSPAPPGPAPAAGAGAGGGGGGGGAGGGGSAGSGAKNPLVKPPYSYIALITMAILQSPKKRLTLSEICEFISGRFPYYREKFPAWQNSIRHNLSLNDCFVKIPREPGNPGKGNYWTLDPESADMFDNGSFLRRRKRFKRQPLLPPNAAAAESLLLRGAGAAGGAGDPAAAAALFPPAPPPPPHAYGYGPYGCGYGLQLPPYAPPSALFAAAAAAAAAAAFHPHSPPPPPPPHGAAAELARTAFGYRPHPLGAALPGPLPASAAKAGGPGASALARSPFSIESIIGGSLGPAAAAAAAAQAAAAAQASPSPSPVAAPPAPGSSGGGCAAQAAVGPAAALTRSLVAAAAAAASSVSSSAALGTLHQGTALSSVENFTARISNC

SEQ ID NO: 137 - DNA, 2570 bp, Homo sapiens
  misc_feature 779: n = A,T,C or G
acaaagtcttgctctgtcacccaggctggagtgcagtggcgcaatcacggctctctgcagcctcgacctccgrggctcaagctattctcctgcctcaccctcctgagtagatgggactacaggtacgtgcggctatctagctaattttttaaatcttaagtagagacattggtctcactgtgttgcccagactggtcttgaactcctaggttgaagggatcttccagcctctgcctcccgaagtgctgtattacagaacatatgcagtaatgtcacctcaaaagagagttaagaacgtccaggcacaaaacaggacttcacaaggtagtagtagttttcagaccacgctttcagcctggaaagtaaaacaggatccaagcaactcgaagaacatctcaaaacatggacaaaacaatccagtgggagattatgaacatgctgatgatcaagctgaagaagatgctttgcaaatggcagtgggatattttgagaaaggtcccattaaagcttcacagaataaagataaaaccttggaaaaacacttgaaaactgtggaaaatgtggcttggaagaatgggttagcttcagaagaaattgatattctattaaatattgcactcagtggcaaatttggaaatgctgtaaacacacggatattgaagtgcatgatcccagcaacagtaatatcagaagattctgtggttaaggcagtctcctggctttgtgttggcaagtgttctggtagcaccaaggtacttttttatcgttggctggttgcnatgtttgacttcattgatcgyaaggagcaaattaacttgctctatggcttcttttttgcttcattgcaagatgatgcactgtgcccttatgtttgccatttgttatatttacttacgaaaaaagagaatgtcaaaccatttcgtgtgagaaaactgcttgatcttcaggccaaaatgggaatgcagcctcatctccaggctttgttgtcactgtataagttctttgctcctgctctgatttcagtatctttgcctgtaaggaagaagatatatcttcagaattcagagaatctatggaagacggctctgcttgccgtgaagcaaagaaaccggggaccttctccagaacctctgaagttgatgttaggtccagctaatgttcgtcctctaaaaagaaagtggaattctctctcagttataccagtgctcaattccagtagctacactaaagaatgtggaaaaaaagagatgagtctttctgattgtctgaatagaagtggatcatttccactagaacaacttcaaagcttcccccaacttttacagaacatccattgcttagagctgccttctcagatgggctcagtgctaaacaactctctgctgcttcactacattaactgtgtcagagatgagccagtcttgctgaggtttcattactggttgagtcaaacattacaagaagaatgtatttggtacaaggtgaataattatgaacatggaaaagaatttaccaacttcctggataccatcatcagggcagagtgcttcttacaagaggggtattattcctgtgaagcattcctgtataagagccttcctctctgggatggccttagttgtcggtcacagttccttcagcttgtgagctggattccttttagtagcttctctgaggtgaaaccacttctttttgaccatctagcgcagctcttctttacatcaaccatttatttcaagtgtagtgtgcttcagagtctgaaagagctattgcagaattggctgttgtggctttctatggacattcacatgaaacctgttacraacagtcctctagagacaactttgggtggatccatgaactgtgtgtctaaactgatccactatgtagggtggctatccactactgcaatgcgcttggagagcaacaatactttcttgctgcactttattttggatttctatgagaaggtgtgtgacatatatataaattatgaccttccattagtggtattgtttcctcctgggatcttctattctgcactcctcagcctggataccagcatcctgaaccagctgtgttttattatgcacagatatcgtaaaaatttgactgccgcaaagaaaaatgagttggtacaaaagacaaaatcagagttcaatttcagcagcaagacttatcaagaatttaattactatttgacatcaatggttggttgcctgtggacgtccaaaccctttgcgaaaggaatatatattgaccctgaaatcctagaaaaaactggagtggctgaatataaaaacagtttaaatgtagtccatcatccttctttcttgagttacgctgtttcctttttgctacaggaaagcccagaagaaaggacagtaaacgtgagctctatycggggaaagaaatggagctggtatttggactatttattttcacaggggttacaaggcttgaaactttttataagaagtagtgttcatcattcttccattcccagagcagagggcataaactgcaacaatcaatattaaatgaatgttgacataaactgaaaaaaaaaa

SEQ ID NO: 138 - protein, 756 aa, Homo sapiens
MSPQKRVKNVQAQNRTSQGSSSFQTTLSAWKVKQDPSNSKNISKHGQNNPVGDYEHADDQAEEDALQMAVGYFEKGPIKASQNKDKTLEKHLKTVENVAWKNGLASEEIDILLNIALSGKFGNAVNTRILKCMIPATVISEDSVVKAVSWLCVGKCSGSTKVLFYRWLVAMFDFIDRKEQINLLYGFFFASLQDDALCPYVCHLLYLLTKKENVKPFRVRKLLDLQAKMGMQPHLQALLSLYKFFAPALISVSLPVRKKIYLQNSENLWKTALLAVKQRNRGPSPEPLKLMLGPANVRPLKRKWNSLSVIPVLNSSSYTKECGKKEMSLSDCLNRSGSFPLEQLQSFPQLLQNIHCLELPSQMGSVLNNSLLLHYINCVRDEPVLLRFHYWLSQTLQEECIWYKVNNYEHGKEFTNFLDTIIRAECFLQEGYYSCEAFLYKSLPLWDGLSCRSQFLQLVSWIPFSSFSEVKPLLFDHLAQLFFTSTIYFKCSVLQSLKELLQNWLLWLSMDIHMKPVTNSPLETTLGGSMNCVSKLIHYVGWLSTTAMRLESNNTFLLHFILDFYEKVCDIYINYDLPLVVLFPPGIFYSALLSLDTSILNQLCFIMHRYRKNLTAAKKNELVQKTKSEFNFSSKTYQEFNYYLTSMVGCLWTSKPFAKGIYIDPEILEKTGVAEYKNSLNVVHHPSFLSYAVSFLLQESPEERTVNVSSIRGKKWSWYLDYLFSQGLQGLKLFIRSSVHHSSIPRAEGINCNNQY

SEQ ID NO: 139 - DNA, 1304 bp, Homo sapiens
gttctccacaactgccagcaatccttccaccaggcaaaacacatcatctaaggaaaagaagtgaggtttgcttagggcgtggcagcttcggataaacgcaggactccgcctggcagcccgatttctcccggaacctctgctcagcctggtgaaccacacaggccagcgctctgacatgcagaaggtgaccctgggcctgcttgtgttcctggcaggctttcctgtcctggacgccaatgacctagaagataaaaacagtcctttctactatgactggcacagcctccaggttggcgggctcatctgcgctggggttctgtgcgccatgggcatcatcatcgtcatgagtgcaaaatgcaaatgcaagtttggccagaagtccggtcaccatccaggggagactccacctctcatcaccccaggctcagcccaaagctgatgaggacagaccagctgaaattgggtggaggaccgttctctgtccccaggtcctgtctctgcacagaaacttgaactccaggatggaattcttcctcctctgctgggactcctttgcatggcagggcctcatctcacctctcgcaagagggtctctttgttcaattttttttaatctaaaatgattgtgcctctgcccaagcagcctggagacttcctatgtgtgcattggggtggggcttggggcaccatgagaaggttggcgtgccctggaggctgacacagaggctggcactgagcctgcttgttgggaaaagcccacaggcctgttcccttgtggcttgggacatggcacaggcccgccctctgcctcctcagccatgggacctcatatgcaatttgggatttactagtagccaaaaggaatgaaagagagctctaaccagatggaacactggaacattccagtggaccctggaccattccaggaaaactgggacataggatcgtcccgctatgatggaagtgttcagacagtttataatagtaagcccctgtgaccctctcacttaccccgagacctcactttattacaagatctttccaaatacccaaatatccctgcaagcccgttaaataattccctatgctacccttaataacatacaatgaccacatagtgtgagaacttccaacaagcctcaaagtcccttgagactccccaatacctaataaggcatgcgaaatgttctcatgaactaccccacaacacgcctaaaactcaaaacacccaaaaatatctcctccaatgtcctgagacatgaacccaaaaagagacccacaataaactcgtgacttgtcccctc

SEQ ID NO: 140 - protein, 87 aa, Homo sapiens
MQKVTLGLLVFLAGFPVLDANDLEDKNSPFYYDWHSLQVGGLICAGVLCAMGIIIVMSAKCKCKFGQKSGHHPGETPPLITPGSAQS

SEQ ID NO: 141 - DNA, 1466 bp, Homo sapiens
gttctccacaactgccagcaatccttccaccaggcaaaacacatcatctaaggaaaagaagtgaggtttgcttagggcgtggcagcttcggataaacgcaggactccgcctggcagcccgatttctcccggaacctctgctcagcctggtgaaccacacaggcccgagtttcacccagtccccactccacggtgcagctgcggcttatctctcagcccagcgagatgccagccttcctgtcccgggccagcgctctgacatgcagaaggtgaccctgggcctgcttgtgttcctggcaggctttcctgtcctggacgccaatgacctagaagataaaaacagtcctttctactatgactggcacagcctccaggttggcgggctcatctgcgctggggttctgtgcgccatgggcatcatcatcgtcatgagtgagtggaggagctcgggggagcaggcgggccggggctggggctcccctcccctgaccactcagctctccccaacaggtgcaaaatgcaaatgcaagtttggccagaagtccggtcaccatccaggggagactccacctctcatcacccccggctcagcccaaagctgatgaggacagaccagctgaaattgggtggaggaccgttctctgtccccaggtcctgtctctgcacagaaacttgaactccaggatggaattcttcctcctctgctgggactcctttgcatggcagggcctcatctcacctctcgcaagagggtctctttgttcaattttttttaatctaaaatgattgtgcctctgcccaagcagcctggagacttcctatgtgtgcattggggtggggcttggggcaccatgagaaggttggcgtgccctggaggctgacacagaggctggcactgagcctgcttgttgggaaaagcccacaggcctgttcccttgtggcttgggacatggcacaggcccgccctctgcctcctcagccatgggacctcatatgcaatttgggatttactagtagccaaaaggaatgaaagagagctctaaccagatggaacactggaacattccagtggaccctggaccattccaggaaaactgggacataggatcgtcccgctatgatggaagtgttcagacagtttataatagtaagcccctgtgaccctctcacttaccccgagacctcactttattacaagatctttccaaatacccaaatatccctgcaagcccgttaaataattccctatgctacccttaataacatacaatgaccacatagtgtgagaacttccaacaagcctcaaagtcccttgagactccccaatacctaataaggcatgcgaaatgttctcatgaactaccccacaacacgcctaaaactcaaaacacccaaaaatatctcctccaatgtcctgagacatgaacccaaaaagagacccacaataaactcgtgacttgtcccctc

SEQ ID NO: 142 - protein, 113 aa, Homo sapiens
MQKVTLGLLVFLAGFPVLDANDLEDKNSPFYYDWHSLQVGGLICAGVLCAMGIIIVMSEWRSSGEQAGRGWGSPPLTTQLSPTGAKCKCKFGQKSGHHPGETPPLITPGSAQS

SEQ ID NO: 143 - DNA, 3195 bp, Homo sapiens
acagcatggagtggggttacctgttggaagtgacctcgctgctggccgccttggcgctgctgcagcgctctagcggcgctgcggccgcctcggccaaggagctggcatgccaagagatcaccgtgccgctgtgtaagggcatcggctacaactacacctacatgcccaatcagttcaaccacgacacgcaagacgaggcgggcctggaggtgcaccagttctggccgctggtggagatccagtgctcgcccgatctcaagttcttcctgtgcagcatgtacacgcccatctgcctagaggactacaagaagccgctgccgccctgccgctcggtgtgcgagcgcgccaaggccggctgcgcgccgctcatgcgccagtacggcttcgcctggcccgaccgcatgcgctgcgaccggctgcccgagcaaggcaaccctgacacgctgtgcatggactacaaccgcaccgacctaaccaccgccgcgcccagcccgccgcgccgcctgccgccgccgccgcccggcgagcagccgccttcgggcagcggccacggccgcccgccgggggccaggcccccgcaccgcggaggcggcaggggcggtggcggcggggacgcggcggcgcccccagctcgcggcggcggcggtggcgggaaggcgcggccccctggcggcggcgcggctccctgcgagcccgggtgccagtgccgcgcgcctatggtgagcgtgtccagcgagcgccacccgctctacaaccgcgtcaagacaggccagatcgctaactgcgcgctgccctgccacaacccctttttcagccaggacgagcgcgccttcaccgtcttctggatcggcctgtggtcggtgctctgcttcgtgtccaccttcgccaccgtctccaccttccttatcgacatggagcgcttcaagtacccggagcggcccattatcttcctctcggcctgctacctcttcgtgtcggtgggctacctagtgcgcctggtggcgggccacgagaaggtggcgtgcagcggtggcgcgccgggcgcggggggcgctgggggcgcgggcggcgcggcggcgggcgcgggcgcggcgggcgcgggcgcgggcggcccgggcgggcgcggcgagtacgaggagctgggcgcggtggagcagcacgtgcgctacgagaccaccggccccgcgctgtgcaccgtggtcttcttgctggtctacttcttcggcatggccagctccatctggtgggtgatcttgtcgctcacatggttcctggcggccggtatgaagtggggcaacgaagccatcgccggctactcgcagtacttccacctggccgcgtggcttgtgcccagcgtcaagtccatcgcggtgctggcgctcagctcggtggacggcgacccggtggcgggcatctgctacgtgggcaaccagagcctggacaacctgcgcggcttcgtgctggcgccgctggtcatctacctcttcatcggcaccatgttcctgctggccggcttcgtgtccctgttccgcatccgctcggtcatcaagcaacaggacggccccaccaagacgcacaagctggagaagctgatgatccgcctgggcctgttcaccgtgctctacaccgtgcccgccgcggtggtggtcgcctgcctcttctacgagcagcacaaccgcccgcgctgggaggccacgcacaactgcccgtgcctgcgggacctgcagcccgaccaggcacgcaggcccgactacgccgtcttcatgctcaagtacttcatgtgcctagtggtgggcatcacctcgggcgtgtgggtctggtccggcaagacgctggagtcctggcgctccctgtgcacccgctgctgctgggccagcaagggcgccgcggtgggcgggggcgcgggcgccacggccgcggggggtggcggcgggccggggggcggcggcggcgggggacccggcggcggcggggggccgggcggcggcgggggctccctctacagcgacgtcagcactggcctgacgtggcggtcgggcacggcgagctccgtgtcttatccaaagcagatgccattgtcccaggtctgagcggaggggagggggcgcccaggaggggtggggaggggggcgaggagacccaagtgcagcgaagggacacttgatgggctgaggttcccaccccttcacagtgttgattgctattagcatgataatgaactcttaatggtatccattagctgggacttaaatgactcacttagaacaaagtacctggcattgaagcctcccagacccagccccttttcctccattgatgtgcggggagctcctcccgccacgcgttaatttctgttggctgaggagggtggactctgcggcgtttccagaacccgagatttggagccctccctggctgcacttggctgggtttgcagtcagatacacagatttcacctgggagaacctctttttctccctcgactcttcctacgtaaactcccacccctgacttaccctggaggaggggtgaccgccacctgatgggattgcacggtttgggtattcttaatgaccaggcaaatgccttaagtaaacaaacaagaaatgtcttaattatacaccccacgtaaatacgggtttcttacattagaggatgtatttatataattatttgttaaattgtaaaaaaaaaaagtgtaaaatatgtatatatccaaagatatagtgtgtacatttttttgtaaaaagtttagaggcttacccctgtaagaacagatataagtattctattttgtcaataaaatgacttttgataaatgatttaaccattgccctctcccccgcctcttctgagctgtcacctttaaagtgcttgctaaggacgcatggggaaaatggacattttctggcttgtcattctgtacactgaccttaggcatggagaaaattacttgttaaactctagttcttaagttgttagccaagtaaatatcattgttgaactgaaatcaaaattgagtttttgcaccttccccaaagacggtgtttttcatgggagctcttttctgatccatggataacaactctcactttagtggatgtaaatggaacttctgcaaggcagtaattccccttaggccttgttatttatcctgcatggtatcactaaaggtttcaaaaccctgaaaaaaaa

SEQ ID NO: 144 - protein, 694 aa, Homo sapiens
MEWGYLLEVTSLLAALALLQRSSGAAAASAKELACQEITVPLCKGIGYNYTYMPNQFNHDTQDEAGLEVHQFWPLVEIQCSPDLKFFLCSMYTPICLEDYKKPLPPCRSVCERAKAGCAPLMRQYGFAWPDRMRCDRLPEQGNPDTLCMDYNRTDLTTAAPSPPRRLPPPPPGEQPPSGSGHGRPPGARPPHRGGGRGGGGGDAAAPPARGGGGGGKARPPGGGAAPCEPGCQCRAPMVSVSSERHPLYNRVKTGQIANCALPCHNPFFSQDERAFTVFWIGLWSVLCFVSTFATVSTFLIDMERFKYPERPIIFLSACYLFVSVGYLVRLVAGHEKVACSGGAPGAGGAGGAGGAAAGAGAAGAGAGGPGGRGEYEELGAVEQHVRYETTGPALCTVVFLLVYFFGMASSIWWVILSLTWFLAAGMKWGNEAIAGYSQYFHLAAWLVPSVKSIAVLALSSVDGDPVAGICYVGNQSLDNLRGFVLAPLVIYLFIGTMFLLAGFVSLFRIRSVIKQQDGPTKTHKLEKLMIRLGLFTVLYTVPAAVVVACLFYEQHNRPRWEATHNCPCLRDLQPDQARRPDYAVFMLKYFMCLVVGITSGVWVWSGKTLESWRSLCTRCCWASKGAAVGGGAGATAAGGGGGPGGGGGGGPGGGGGPGGGGGSLYSDVSTGLTWRSGTASSVSYPKQMPLSQV

SEQ ID NO: 145 - DNA, 3874 bp, Homo sapiens
atggctcacctaaagcgactagtaaaattacacattaaaagacattaccataaaaagttctggaagcttggtgcagtaatttttttctttataatagttttggttttaatgcaaagagaagtaagtgttcaatattccaaagaggaatcaaggatggaaaggaacatgaaaaacaaaaacaagatgttggatttaatgctagaagctgtaaacaatattaaggatgccatgccaaaaatgcaaataggagcacctgtcaggcaaaacattgatgctggtgagagaccttgtttgcaaggatattatacagcagcagaattgaagcctgtccttgaccgtccacctcaggattcaaatgcacctggtgcttctggtaaagcattcaagacaaccaatttaagtgttgaagagcaaaaggaaaaggaacgtggggaagctaaacactgctttaatgctttcgcaagtgacaggatttctttgcaccgagatcttggaccagacactcgacctcctgaatgtattgaacaaaaatttaagcgctgccctcccctgcccaccaccagtgtcataatagtttttcataatgaagcgtggtccacgttgcttagaactgtccacagtgtgctctattcttcacctgcaatactgctgaaggaaatcattttggtggatgatgctagtgtagatgagtacttacatgataaactagatgaatatgtaaaacaattttctatagtaaaaatagtcagacaaagagaaagaaaaggtctgatcactgctcggttgctaggagcaacagtcgcaacagctgaaacgctcacatttttagatgctcactgtgagtgtttctatggttggctagaacctctgttggccagaatagctgagaactacacggctgtcgtaagtccagatattgcatccatagatctgaacacgtttgaattcaacaaaccttctccttatggaagtaaccataaccgtggaaattttgactggagtctttcatttggctgggagtcgcttcctgatcatgagaagcaaagaaggaaagatgaaacctacccaattaaaacacccacttttgcaggaggacttttttccatatcaaaagaatattttgagtatattggaagctatgatgaagaaatggaaatctggggaggtgaaaatatagaaatgtctttcagagtatggcaatgtggtgggcagttggagattatgccttgctctgttgttggacatgtttttcgcagcaaaagccctcatagctttccaaaaggcactcaggtgattgctagaaaccaagttcgccttgcagaagtctggatggatgaatacaaggaaatattttataggagaaatacagatgcagcaaaaattgttaaacaaaaagcatttggtgatctttcaaaaagatttgaaataaaacaccgtcttcggtgtaaaaattttacatggtatctgaacaacatttatccagaggtgtatgtgccagaccttaatcctgttatatctggatacattaaaagcgttggtcagcctctatgtctggatgttggagaaaacaatcaaggaggcaaaccattaattatgtatacatgtcatggacttgggggaaaccagtactttgaatactctgctcaacatgaaattcggcacaacatccagaaggaattatgtcttcatgctgctcaaggtctcgttcagctgaaggcatgtacctacaaaggtcacaagacagttgtcactggagagcagatatgggagatccagaaggatcaacttctatacaatccattcttaaaaatgtgcctttcagcaaatggagagcatccaagtttagtgtcatgcaacccatcagatccactccaaaaatggatacttagccaaaatgattaagtgttccttaaaattaagttgaaaaaggaaatattctttctcataaaactgtgactaggcatacactgtagtttttgaaaattatgcaaaagcagctaaatgtaacttattccaagtgcatttttcttatttatatctttatgtagcactactacagaaattctgcaagtttctgtttcaaagcacaataactagtaataccaaagactatttcaaaatgtccagatgtaggggaagagatgtttacagtatgatgaaaataattttccaagtaaagtgatgtttgtgtgttttgtacacttagggatatatatatatagctacattcacacactcacaatttaaaatatttcccctagttttttggggggataggaagaaagatttgttactgtatttttttaactacataaaaatagatcaataaatgtcagcattggcctctgtgtacaaaccaagagcttttacagatccagaatttattagtttaaaatgcaggtgaacttttttttgcgtttggtttacttgtctgtcaaatgtttccttaaacatgaaactgaataaggagaagagtatttttaacacttaaatttcttggcaaattttaaaacattttttagtctgtaatacactccacttgaagcacttaagtcttccttaaatgacttttcttaagtaatgatactgtgtgttttcccaaagcacttttaaaaaaatttttataaattactatctgttgaaaaggtgtccttttcctttcttctagtattttttttcttaccaaaattcactaatcttgaatgtttgtgatattaaatttcaaatgcagaatacttgactcatttaaagctaaattttgttactgattcaattataattgtaatggatttttgactttgtaatggattcttttcatcaaaaagccttattattttttatctatgtggaaaacacaataaaaaatcctcaacactattgtaatcatttggttaagtgcttattcctcttttgggtaaaatctgtaattgataataggtgggggaaaatgaattttgtatgctgaatttctaagcgcctattgtttgtaaaaccatcagatatttcttatggcacaaaaaatgaggaatagcaaaattcctgtgttcaatatttagaaaattttgtattaatttctgataaagttccttaagcatctgatagaatgatgttttaaaaaaatttgacgcttgcttaggagatttaccactttttttttttgtttttcgtcattttatatttagatctcctgtattcttgttcccgaagtaaaatacgatcggtttcatattttaaatctggcagagcctcagctgtacgaaaaagagcatatactggttattgaccctatcttctcattgtttgtttgtaagtttgaatttgtattaaaaagcctgcattctgagctggacatggtggctcagcttctaatcccagcactttggtaggcaaaggtgggaggatcatttgagctcaggagttccagaccagcctgggcaacatagcaaaatctcatctctacaaaaagtaaaaattaaaaaatgaaattaaaaataaaattacctaggtgtggtggcacgcatctgtagttccagctatacaggaaggtgaggcagaagcattgcttgagcttgggagatcgaggctacagtgagctatgattacaccactgcacttcagtctgtgtgactgagcaagactctttcaaaaaaaaaaaaaagcctacattctccagttgattatttccaactaatgtgtattatgtgcctaattttctatcagaagttgtattaagcccgttttcacactgctgttaaagacatacctgagactgggtaatttataaagaaaaataggttcaatggacccacaggtccgcgtggctggggaagcttcacaatcatggcggaaggtgaaagcatgtcttacgtggaag

SEQ ID NO: 146 - protein, 633 aa, Homo sapiens
MAHLKRLVKLHIKRHYHKKFWKLGAVIFFFIIVLVLMQREVSVQYSKEESRMERNMKNKNKMLDLMLEAVNNIKDAMPKMQIGAPVRQNIDAGERPCLQGYYTAAELKPVLDRPPQDSNAPGASGKAFKTTNLSVEEQKEKERGEAKHCFNAFASDRISLHRDLGPDTRPPECIEQKFKRCPPLPTTSVIIVFHNEAWSTLLRTVHSVLYSSPAILLKEIILVDDASVDEYLHDKLDEYVKQFSIVKIVRQRERKGLITARLLGATVATAETLTFLDAHCECFYGWLEPLLARIAENYTAVVSPDIASIDLNTFEFNKPSPYGSNHNRGNFDWSLSFGWESLPDHEKQRRKDETYPIKTPTFAGGLFSISKEYFEYIGSYDEEMEIWGGENIEMSFRVWQCGGQLEIMPCSVVGHVFRSKSPHSFPKGTQVIARNQVRLAEVWMDEYKEIFYRRNTDAAKIVKQKAFGDLSKRFEIKHRLRCKNFTWYLNNIYPEVYVPDLNPVISGYIKSVGQPLCLDVGENNQGGKPLIMYTCHGLGGNQYFEYSAQHEIRHNIQKELCLHAAQGLVQLKACTYKGHKTVVTGEQIWEIQKDQLLYNPFLKMCLSANGEHPSLVSCNPSDPLQKWILSQND

SEQ ID NO: 147 - DNA, 3033 bp, Homo sapiens
atggcagcccgagtacttataattggcagtggaggaagggaacatacgctggcctggaaacttgcacagtctcatcatgtcaaacaagtgttggttgccccaggaaacgcaggcactgcctgctctgaaaagatttcaaataccgccatctcaatcagtgaccacactgcccttgctcaattctgcaaagagaagaaaattgaatttgtagttgttggaccagaagcacctctggctgctgggattgttgggaacctgaggtctgcaggagtgcaatgctttggcccaacagcagaagcggctcagttagagtccagcaaaaggtttgccaaagagtttatggacagacatggaatcccaaccgcacaatggaaggctttcaccaaacctgaagaagcctgcagcttcattttgagtgcagacttccctgctttggttgtgaaggccagtggtcttgcagctggaaaaggggtgattgttgcaaagagcaaagaagaggcctgcaaagctgtacaagagatcatgcaggagaaagcctttggggcagctggagaaacaattgtcattgaagaacttcttgacggagaagaggtgtcgtgtctgtgtttcactgatggcaagactgtggcccccatgcccccagcacaggaccataagcgattactggagggagatggtggccctaacacagggggaatgggagcctattgtccagcccctcaggtttctaatgatctattactaaaaattaaagatactgttcttcagaggacagtggatggcatgcagcaagagggtactccatatacaggtattctctatgctggaataatgctgaccaagaatggcccaaaagttctagagtttaattgccgttttggtgatccagagtgccaagtaatcctcccacttcttaaaagtgatctttatgaagtgattcagtccaccttagatggactgctctgcacatctctgcctgtttggctagaaaaccacaccgccctaactgttgtcatggcaagtaaaggttatcctggagactacaccaagggtgtagagataacagggtttcctgaggctcaagctctaggactggaggtgttccatgcaggcactgccctcaaaaatggcaaagtagtaactcatgggggtagagttcttgcagtcacagccatccgggaaaatctcatatcagcccttgaggaagccaagaaaggactagctgctataaagtttgagggagcaatttataggaaagacgtcggctttcgtgccatagctttcctccagcagcccaggagtttgacttacaaggaatctggagtagatatcgcagctggaaatatgctggtcaagaaaattcagcctttagcaaaagccacttccagatcaggctgtaaagttgatcttggaggttttgctggtctttttgatttaaaagcagctggtttcaaagatccccttctggcctctggaacagatggcgttggaactaaactaaagattgcccagctatgcaataaacatgataccattggtcaagatttggtagcaatgtgtgttaatgatattctggcacaaggagcagagcccctcttcttccttgattacttttcctgtggaaaacttgacctcagtgtaactgaagctgttgttgctggaattgctaaagcttgtggaaaagctggatgtgctctccttggaggtgaaacagcagaaatgcctgacatgtatccccctggagagtatgacctagctgggtttgccgttggtgccatggagcgagatcagaaactccctcacctggaaagaatcactgagggtgatgttgttgttggaatagcttcatctggtcttcatagcaatggatttagccttgtgaggaaaatcgttgcaaaatcttccctccagtactcctctccagcacctgatggttgtggtgaccagactttaggggacttacttctcacgcctaccagaatctacagccattcactgttacctgtcctacgttcaggacatgtcaaagcctttgcccatattactggtggaggattactagagaacatccccagagtcctccctgagaaacttggggtagatttagatgcccagacctggaggatccccagggttttctcatggttgcagcaggaaggacacctctctgaggaagagatggccagaacatttaactgtggggttggcgctgtccttgtggtatcaaaggagcagacagagcagattctgagggatatccagcagcacaaggaagaagcctgggtgattggcagtgtggttgcacgagctgaaggttccccacgtgtgaaagtcaagaatctgattgaaagcatgcaaataaatgggtcagtgttgaagaatggctccctgacaaatcatttctcttttgaaaaaaaaaaggccagagtggctgtcttaatatctggaacaggatcgaacctgcaagcacttatagacagtactcgggaaccaaatagctctgcacaaattgatattgttatctccaacaaagccgcagtagctgggttagataaagcggaaagagctggtattcccactagagtaattaatcataaactgtataaaaatcgtgtagaatttgacagtgcaattgacctagtccttgaagagttctccatagacatagtctgtcttgcaggattcatgagaattctttctggcccctttgtccaaaagtggaatggaaaaatgctcaatatccacccatccttgctcccttcttttaagggttcaaatgcccatgagcaagccctggaaaccggagtcacagttactgggtgcactgtacactttgtagctgaagatgtggatgctggacagattattttgcaagaagctgttcccgtgaagaggggtgatactgtcgcaactctttctgaaagagtaaaattagcagaacataaaatatttcctgcagcccttcagctggtggccagtggaactgtacagcttggagaaaatggcaagatctgttgggttaaagaggaatga

SEQ ID NO: 148 - protein, 1010 aa, Homo sapiens
MAARVLIIGSGGREHTLAWKLAQSHHVKQVLVAPGNAGTACSEKISNTAISISDHTALAQFCKEKKIEFVVVGPEAPLAAGIVGNLRSAGVQCFGPTAEAAQLESSKRFAKEFMDRHGIPTAQWKAFTKPEEACSFILSADFPALVVKASGLAAGKGVIVAKSKEEACKAVQEIMQEKAFGAAGETIVIEELLDGEEVSCLCFTDGKTVAPMPPAQDHKRLLEGDGGPNTGGMGAYCPAPQVSNDLLLKIKDTVLQRTVDGMQQEGTPYTGILYAGIMLTKNGPKVLEFNCRFGDPECQVILPLLKSDLYEVIQSTLDGLLCTSLPVWLENHTALTVVMASKGYPGDYTKGVEITGFPEAQALGLEVFHAGTALKNGKVVTHGGRVLAVTAIRENLISALEEAKKGLAAIKFEGAIYRKDVGFRAIAFLQQPRSLTYKESGVDIAAGNMLVKKIQPLAKATSRSGCKVDLGGFAGLFDLKAAGFKDPLLASGTDGVGTKLKIAQLCNKHDTIGQDLVAMCVNDILAQGAEPLFFLDYFSCGKLDLSVTEAVVAGIAKACGKAGCALLGGETAEMPDMYPPGEYDLAGFAVGAMERDQKLPHLERITEGDVVVGIASSGLHSNGFSLVRKIVAKSSLQYSSPAPDGCGDQTLGDLLLTPTRIYSHSLLPVLRSGHVKAFAHITGGGLLENIPRVLPEKLGVDLDAQTWRIPRVFSWLQQEGHLSEEEMARTFNCGVGAVLVVSKEQTEQILRDIQQHKEEAWVIGSVVARAEGSPRVKVKNLIESMQINGSVLKNGSLTNHFSFEKKKARVAVLISGTGSNLQALIDSTREPNSSAQIDIVISNKAAVAGLDKAERAGIPTRVINHKLYKNRVEFDSAIDLVLEEFSIDIVCLAGFMRILSGPFVQKWNGKMLNIHPSLLPSFKGSNAHEQALETGVTVTGCTVHFVAEDVDAGQIILQEAVPVKRGDTVATLSERVKLAEHKIFPAALQLVASGTVQLGENGKICWVKEE

SEQ ID NO: 149 - DNA, 1558 bp, Homo sapiens
cctctgggaaagggcagcaggagccaggtgtggcagtgacagggaggtgtgaatgaggcaggatgaactggacaggtttgtacaccttgctcagtggcgtgaaccggcattctactgccattggccgagtatggctctcggtcatcttcatcttcagaatcatggtgctggtggtggctgcagagagtgtgtggggtgatgagaaatcttccttcatctgcaacacactccagcctggctgcaacagcgtttgctatgaccaattcttccccatctcccatgtgcggctgtggtccctgcagctcatcctagtttccaccccagctctcctcgtggccatgcacgtggctcaccagcaacacatagagaagaaaatgctacggcttgagggccatggggaccccctacacctggaggaggtgaagaggcacaaggtccacatctcagggacactgtggtggacctatgtcatcagcgtggtgttccggctgttgtttgaggccgtcttcatgtatgtcttttatctgctctaccctggctatgccatggtgcggctggtcaagtgcgacgtctacccctgccccaacacagtggactgcttcgtgtcccgccccaccgagaaaaccgtcttcaccgtcttcatgctagctgcctctggcatctgcatcatcctcaatgtggccgaggtggtgtacctcatcatccgggcctgtgcccgccgagcccagcgccgctccaatccaccttcccgcaagggctcgggcttcggccaccgcctctcacctgaatacaagcagaatgagatcaacaagctgctgagtgagcaggatggctccctgaaagacatactgcgccgcagccctggcaccggggctgggctggctgaaaagagcgaccgctgctcggcctgctgatgccacataccaggcaacctgccatccatccccgaccctgccctgggcgaagccctcctccttctcccctgccggtgcacaggcctctgcctgctggggattactcgatcaaaaccttccttccctggctacttcccttcctcccggggccttccttttaggtgctggagctggaggggtggggagctagaggccacctatgccagtgctcaaggttactgggagtgtgggctgcccttgttgcctgcacccttccctcttccctctccctctctctgggaccactgggtacaagagatgggatgctccgacagcgtctccaattatgaaactaatcttaaccctgtgctgtcagataccctggttttctggagtcacagtcagtgaggaggatgtggtaagaggaggcagagggcaggggtgctgtggacatgtgggtggagaagggagggtggccagcactagtaaaggaggaatagtgcttgctggccacaaggaaaaggaggaggtgtctggggtgagggagttagggagagagaagcaggcagataagttggagcaggggtggtcaaggccacctctgcctctagtccccaaggcctctctctgcctgaaatgttacacattaaacaggattttacagt

SEQ ID NO: 150 - protein, 283 aa, Homo sapiens
MNWTGLYTLLSGVNRHSTAIGRVWLSVIFIFRIMVLVVAAESVWGDEKSSFICNTLQPGCNSVCYDQFFPISHVRLWSLQLILVSTPALLVAMHVAHQQHIEKKMLRLEGHGDPLHLEEVKRHKVHISGTLWWTYVISVVFRLLFEAVFMYVFYLLYPGYAMVRLVKCDVYPCPNTVDCFVSRPTEKTVFTVFMLAASGICIILNVAEVVYLIIRACARRAQRRSNPPSRKGSGFGHRLSPEYKQNEINKLLSEQDGSLKDILRRSPGTGAGLAEKSDRCSAC

SEQ ID NO: 151 - DNA, 1419 bp, Homo sapiens
ggcacgagggggagaagagcggagcgtgtgagcagtactgcggcctcctctcctctcctaacctcgctctcgcggcctacctttacccgcccgcctgctcggcgaccagaacaccttccaccatgaccacctcagcaagttcccacttaaataaaggcatcaagcaggtgtacatgtccctgcctcagggtgagaaagtccaggccatgtatatctggatcgatggtactggagaaggactgcgctgcaagacccggaccctggacagtgagcccaagtgtgtggaagagttgcctgagtggaatttcgatggctccagtactttacagtctgagggttccaacagtgacatgtatctcgtgcctgctgccatgtttcgggaccccttccgtaaggaccctaacaagctggtgttatgtgaagttttcaagtacaatcgaaggcctgcagagaccaatttgaggcacacctgtaaacggataatggacatggtgagcaaccagcacccctggtttggcatggagcaggagtataccctcatggggacagatgggcacccctttggttggccttccaacggcttcccagggccccagggtccatattactgtggtgtgggagcagacagagcctatggcagggacatcgtggaggcccattaccgggcctgcttgtatgctggagtcaagattgcggggactaatgccgaggtcatgcctgcccagtgggaatttcagattggaccttgtgaaggaatcagcatgggagatcatctctgggtggcccgtttcatcttgcatcgtgtgtgtgaagactttggagtgatagcaacctttgatcctaagcccattcctgggaactggaatggtgcaggctgccataccaacttcagcaccaaggccatgcgggaggagaatggtctgaagtacatcgaggaggccattgagaaactaagcaagcggcaccagtaccacatccgtgcctatgatcccaagggaggcctggacaatgcccgacgtctaactggattccatgaaacctccaacatcaacgacttttctgctggtgtagccaatcgtagcgccagcatacgcattccccggactgttggccaggagaagaagggttactttgaagatcgtcgcccctctgccaactgcgaccccttttcggtgacagaagccctcatccgcacgtgtcttctcaatgaaaccggcgatgagcccttccagtacaaaaattaagtggactagacctccagctgttgagcccctcctagttcttcatcccactccaactcttccccctctcccagttgtcccgattgtaactcaaagggtggaatatcaaggtcgtttttttcattccaaaaaaaaaaaaaaaaaaaaaaaaaaaaaaaaaaaaaaaaaaaaaaaaaaa

SEQ ID NO: 152 - protein, 373 aa, Homo sapiens
MTTSASSHLNKGIKQVYMSLPQGEKVQAMYIWIDGTGEGLRCKTRTLDSEPKCVEELPEWNFDGSSTLQSEGSNSDMYLVPAAMFRDPFRKDPNKLVLCEVFKYNRRPAETNLRHTCKRIMDMVSNQHPWFGMEQEYTLMGTDGHPFGWPSNGFPGPQGPYYCGVGADRAYGRDIVEAHYRACLYAGVKIAGTNAEVMPAQWEFQIGPCEGISMGDHLWVARFILHRVCEDFGVIATFDPKPIPGNWNGAGCHTNFSTKAMREENGLKYIEEAIEKLSKRHQYHIRAYDPKGGLDNARRLTGFHETSNINDFSAGVANRSASIRIPRTVGQEKKGYFEDRRPSANCDPFSVTEALIRTCLLNETGDEPFQYKN

SEQ ID NO: 153 - DNA, 5036 bp, Homo sapiens
gtttagtgttaacctcagctacactgaaggaatagaccttagtcctcacaagtataagttctagcttggaagcctgggttctgcagtagctgtggaacttaagcctctgagctcagggatgcagaggcattgagttactaccaagggcctgatcttttctttagcaggcatctgtgttaattgtttcaaaaggtggtgatcagttttacagcctattataaaggagatttttgcctactataaaactaatccccctgaaagagtgagtaaacataactttttgtgtgttgacttccacaagggaaggagttggcacttacactctgacttttgattcagtcgtccttcttgagccatttttgcaggggatcagtttggagtgggcgttaacaatgttattctttttttcttctccagaacaccttccaccatgaccacctcagcaagttcccacttaaataaaggcatcaagcaggtgtacatgtccctgcctcagggtgagaaagtccaggccatgtatatctggatcgatggtactggagaaggactgcgctgcaagacccggaccctggacagtgagcccaagtgtgtggaagagttgcctgagtggaatttcgatggctctagtactttacagtctgagggttccaacagtgacatgtatctcgtgcctgctgccatgtttcgggaccccttccgtaaggaccctaacaagctggtgttatgtgaagttttcaagtacaatcgaaggcctgcaggtgtgttatagcacagctatggatacccctcctcaatctgtgaatgctgtgaaggggagggagaagacattctgaaatcagcattgggaagactaggcaatttcagcactattttaagaatctgagtgattcttttccctgaacttctgctttgaggaagagataatatggcccatctttctatggtcttctctgttggttgcataaaatagcattggatttgtccagatctgtttgccggtcttggagtccccagtaacagccttcctgcctggaatgtaggccaggacaaatgtaaaccaatggacaaatgtttctcaaaaattatagaatggctccaagtgcctgagaaatgaagaataaatctgacaaccagaagcagctgtcttgtgaatagagggttaagtgcctggcatttggtgcttgggaggtggccagaatgcagataaggtgaaagttgccctgttctaaatccactcccatgtgacttggttgtaactgagtttagttaaaactgaagtctttcagagtcttcctacagatgtacaattaacagcttctctcatttttctgactcggtgatcccaagaaggcctatactgggtcagttcataccatagtgcacacctcagttgtatagaatccaaggactattctcccatcagcatcggtattcagcatctatgtctttagatccctgatggcgtattattgactcttttttctagagaccaatttgaggcacacctgtaaacggataatggacatggtgagcaaccagcacccctggtttggcatggagcaggagtataccctcatggggacagatgggcacccctttggttggccttccaacggcttcccagggccccagggtaagtctccttgggttagaggtgaaattcccagaagtgtctaactgtgcaggaatgccccttcccagggatgggaatgactttcagaatcaagaagcaaaataatacagtaaaggcgaaacagccctcacatcaccaaagtccaaaaatggatatgaatatataaagtaaggttttagggggaacgtttggccccactgaagctgtggtgaagaggaactcccctattgcccctcccctgccccgcacctgcagatgaaggcaaggatagtgattcaagagggcaaggcttaagggccttctgatctctgactttgggattctctggatttcttgactcttagtgttttgtcctgatgcttctgtaggtccatattactgtggtgtgggagcagacagagcctatggcagggacatcgtggaggcccattaccgggcctgcttgtatgctggagtcaagattgcggggactaatgccgaggtcatgcctgcccaggtaagtatagctccaatccatcaatgaagaagggtaggtaggtgtacataggacttttgctagtaagggctgctgatacaccactcactaacccaaaacctaagaacgggttggagtacaggtgagaagagaacaggtttaggagattctgagttggagtgagcagttagctttgttttaatggccaagcttctcgtt[450 bp omitted]ataatttatataatatatattagtcatatatcattatataaatatatatcgatatatatatttgtgacatatgtcatggtgacagggaaaagttgacaaattcatgcatttgaaaatcttttagaactaaattagtaacaatacaggcatgtggataagcttaatgcttatgagggggagaaagtttcaaatgattagtcttttcaacaaacagtaactttgtactgcttgtcgggcactgttctcaccactgagacacacaggtaagaagatgcagccactgccctcatgaagtatttgttctactggtatcatattttggtgcacttcattcttggctccatacctggagacaaggttggactgccatcttttctgtttactctaggtacatcgaggaggccattgagaaactaagcaagcggcaccagtaccacatccgtgcctatgatcccaagggaggcctggacaatgcccgacgtctaactggattccatgaaacctccaacatcaacgacttttctgctggtgtagccaatcgtagcgccagcatacgcattccccggactgttggccaggagaagaagggttactttgaagatcgtcgcccctctgccaactgcgaccccttttcggtgacagaagccctcatccgcacgtgtcttctcaatgaaaccggcgatgagcccttccagtacaaaaattaagtggactagacctccagctgttgagcccctcctagttcttcatcccactccaactcttccccctctcccagttgtcccgattgtaactcaaagggtggaatatcaaggtcgtttttttcattccatgtgcccagttaatcttgctttctttgtttggctgggatagaggggtcaagttattaatttcttcacacctaccctcctttttttccctatcactgaagctttttagtgcattagtggggaggagggtggggagacataaccactgcttccatttaatggggtgcacctgtccaataggcgtagctatccggacagagcacgtttgcagaagggggtctcttcttccaggtagctgaaaggggaagacctgacgtactctggttaggttaggacttgccctcgtggtggaaacttttcttaaaaagttataaccaacttttctattaaaagtgggaattaggagagaaggtaggggttgggaatcagagagaatggctttggtctcttgcttgtgggactagcctggcttgggactaaatgccctgctctgaacacgaagcttagtataaactgatggatatccctaccttgaaagaagaaaaggttcttactgcttggtccttgatttatcacacaaagcagaatagtatttttatatttaaatgtaaagacaaaaaactatatgtatggttttgtggattatgtgtgttttgctaaaggaaaaaaccatccaggtcacggggcaccaaatttgagacaaatagtcggattagaaataaagcatctcattttgagtagagagcaagggaagtggttcttagatggtgatctgggattaggccctcaagacccttttgggtttctgccctgcccaccctctggagaaggtgggcactggattagttaacagacaacacgttactagcagtcacttgatctccgtggctttggtttaaaagacacacttgtccacataggtttagagataagagttggctggtcaacttgagcatgttactgacagagggggtattggggttattttctggtaggaatagcatgtcactaaagcaggccttttgatattaaattttttaaaaagcaaaattatagaagtttagattttaatcaaatttgtagggtttctaggtaatttttacagaattgcttgtttgcttcaactgtctcctacctctgctcttggaggagatggggacagggctggagtcaaaacacttgtaattttgtatcttgatgtctttgttaagactgctgaagaattattttttttcttttataataaggaataaaccccacctttattccttcatttcatctaccattttctggttcttgtgttggctgtggcaggccagctgtggttttcttttgccatgacaacttctaattgccatgtacagtatgttcaaagtcaaataactcctcattgtaaacaaactgtgtaactgcccaaagcagcacttataaatcagcctaacataagaaaaaaaaaaaaaaaaaaaaaaaaaaaaaaaaaaaaaaaaaa

SEQ ID NO: 154 - protein, 112 aa, Homo sapiens
MTTSASSHLNKGIKQVYMSLPQGEKVQAMYIWIDGTGEGLRCKTRTLDSEPKCVEELPEWNFDGSSTLQSEGSNSDMYLVPAAMFRDPFRKDPNKLVLCEVFKYNRRPAGVL

SEQ ID NO: 155 - DNA, 3042 bp, Homo sapiens
cggaggcgctgggcgcacggcgcggagccggccggagctcgaggccggcggcggcgggagagcgacccgggcggcctcgtagcggggccccggatccccgagtggcggccggagcctcgaaaagagattctcagcgctgattttgagatgatgggcttgggaaacgggcgtcgcagcatgaagtcgccgcccctcgtgctggccgccctggtggcctgcatcatcgtcttgggcttcaactactggattgcgagctcccggagcgtggacctccagacacggatcatggagctggaaggcagggtccgcagggcggctgcagagagaggcgccgtggagctgaagaagaacgagttccagggagagctggagaagcagcgggagcagcttgacaaaatccagtccagccacaacttccagctggagagcgtcaacaagctgtaccaggacgaaaaggcggttttggtgaataacatcaccacaggtgagaggctcatccgagtgctgcaagaccagttaaagaccctgcagaggaattacggcaggctgcagcaggatgtcctccagtttcagaagaaccagaccaacctggagaggaagttctcctacgacctgagccagtgcatcaatcagatgaaggaggtgaaggaacagtgtgaggagcgaatagaagaggtcaccaaaaaggggaatgaagctgtagcttccagagacctgagtgaaaacaacgaccagagacagcagctccaagccctcagtgagcctcagcccaggctgcaggcagcaggcctgccacacacagaggtgccacaagggaagggaaacgtgcttggtaacagcaagtcccagacaccagcccccagttccgaagtggttttggattcaaagagacaagttgagaaagaggaaaccaatgagatccaggtggtgaatgaggagcctcagagggacaggctgccgcaggagccaggccgggagcaggtggtggaagacagacctgtaggtggaagaggcttcgggggagccggagaactgggccagaccccacaggtgcaggctgccctgtcagtgagccaggaaaatccagagatggagggccctgagcgagaccagcttgtcatccccgacggacaggaggaggagcaggaagctgccggggaagggagaaaccagcagaaactgagaggagaagatgactacaacatggatgaaaatgaagcagaatctgagacagacaagcaagcagccctggcagggaatgacagaaacatagatgtttttaatgttgaagatcagaaaagagacaccataaatttacttgatcagcgtgaaaagcggaatcatacactctgaattgaactggaatcacatatttcacaacagggccgaagagatgactataaaatgttcatgagggactgaatactgaaaactgtgaaatgtactaaataaaatgtacatctgaagatgattattgtgaaattttagtatgcactttgtgtaggaaaaaatggaatggtcttttaaacagcttttgggggggtactttggaagtgtctaataaggtgtcacaatttttggtagtaggtatttcgtgagaagttcaacaccaaaactggaacatagttctccttcaagtgttggcgacagcggggcttcctgattctggaatataactttgtgtaaattaacagccacctatagaagagtccatctgctgtgaaggagagacagagaactctgggttccgtcgtcctgtccacgtgctgtaccaagtgctggtgccagcctgttacctgttctcactgaaaagtctggctaatgctcttgtgtagtcacttctgattctgacaatcaatcaatcaatggcctagagcactgactgttaacacaaacgtcactagcaaagtagcaacagctttaagtctaaatacaaagctgttctgtgtgagaattttttaaaaggctacttgtataataacccttgtcatttttaatgtacaaaacgctattaagtggcttagaatttgaacatttgtggtctttatttactttgcttcgtgtgtgggcaaagcaacatcttccctaaatatatattaccaagaaaagcaagaagcagattaggtttttgacaaaacaaacaggccaaaagggggctgacctggagcagagcatggtgagaggcaaggcatgagagggcaagtttgttgtggacagatctgtgcctactttattactggagtaaaagaaaacaaagttcattgatgtcgaaggatatatacagtgttagaaattaggactgtttagaaaaacaggaatacaatggttgtttttatcatagtgtacacatttagcttgtggtaaatgactcacaaaactgattttaaaatcaagttaatgtgaattttgaaaattactacttaatcctaattcacaataacaatggcattaaggtttgacttgagttggttcttagtattatttatggtaaataggctcttaccacttgcaaataactggccacatcattaatgactgacttcccagtaaggctctctaaggggtaagtaggaggatccacaggatttgagatgctaaggccccagagatcgtttgatccaaccctcttattttcagaggggaaaatggggcctagaagttacagagcatctagctggtgcgctggcacccctggcctcacacagactcccgagtagctgggactacaggcacacagtcactgaagcaggccctgtttgcaattcacgttgccacctccaacttaaacattcttcatatgtgatgtccttagtcactaaggttaaactttcccacccagaaaaggcaacttagataaaatcttagagtactttcatactcttctaagtcctcttccagcctcactttgagtcctccttggggttgataggaattttctcttgctttctcaataaagtctctattcatctcatgtttaatttgtacgcatagaattgctgagaaataaaatgttctgttcaacttaaaaaaaaaaaaaaaaaa

SEQ ID NO: 156 - protein, 400 aa, Homo sapiens [sequence omitted]

SEQ ID NO: 157 - DNA, 1749 bp, Homo sapiens
gtggcctcgaggtggtggcagggccgccccctgcagtccggagacgaacgcacggaccgggcctccggaggcaggttcggctggaaggaaccgctctcgcttcgtcctacacttgcgcaaatgtctccgagcttactcacatagcatattggtatatcaaaatgaaatgcaaggaaccaaaaataacataattgaaggcagtaaaagtgaaattaaataggaagatcatcagtcaaggaagacccactggagaggacagaaaatgaagcagtgttttatcatgtgtatttcagcaggtcttcttgaaatttaactaaaaatatgactgctctctcttcagagaactgctcttttcagtaccagttacgtcaaacaaaccagcccctagacgttaactatctgctattcttgatcatacttgggaaaatattattaaatatccttacactaggaatgagaagaaaaaacacctgtcaaaattttatggaatatttttgcatttcactagcattcgttgatcttttacttttggtaaacatttccattatattgtatttcagggattttgtacttttaagcattaggttcactaaataccacatctgcctatttactcaaattatttcctttacttatggctttttgcattatccagttttcctgacagcttgtatagattattgcctgaatttctctaaaacaaccaagctttcatttaagtgtcaaaaattattttatttctttacagtaattttaatttggatttcagtccttgcttatgttttgggagacccagccatctaccaaagcctgaaggcacagaatgcttattctcgtcactgtcctttctatgtcagcattcagagttactggctgtcatttttcatggtgatgattttatttgtagctttcataacctgttgggaagaagttactactttggtacaggctatcaggataacttcctatatgaatgaaactatcttatattttcctttttcatcccactccagttatactgtgagatctaaaaaaatattcttatccaagctcattgtctgttttctcagtacctggttaccatttgtactacttcaggtaatcattgttttacttaaagttcagattccagcatatattgagatgaatattccctggttatactttgtcaatagttttctcattgctacagtgtattggtttaattgtcacaagcttaatttaaaagacattggattacctttggatccatttgtcaactggaagtgctgcttcattccacttacaattcctaatcttgagcaaattgaaaagcctatatcaataatgatttgttaatattattaattaaaagttacagctgtcataagatcataattttatgaacagaaagaactcaggacatattaaaaaataaactgaactaaaacaacttttgccccctgactgatagcatttcagaatgtgtcttttgaagggctataccagttattaaatagtgttttattttaaaaacaaaataattccaagaagtttttatagttattcagggacactatattacaaatattactttgttattaacacaaaaagtgataagagttaacatttggctatactgatgtttgtgttactcaaaaaaactactggatgcaaactgttatgtaaatctgagatttcactgacaactttaagatatcaacctaaacatttttattaaatgttcaaatgtaagcaagaaaaaaaaaa

SEQ ID NO: 158 - protein, 338 aa, Homo sapiens
MTALSSENCSFQYQLRQTNQPLDVNYLLFLIILGKILLNILTLGMRRKNTCQNFMEYFCISLAFVDLLLLVNISIILYFRDFVLLSIRFTKYHICLFTQIISFTYGFLHYPVFLTACIDYCLNFSKTTKLSFKCQKLFYFFTVILIWISVLAYVLGDPAIYQSLKAQNAYSRHCPFYVSIQSYWLSFFMVMILFVAFITCWEEVTTLVQAIRITSYMNETILYFPFSSHSSYTVRSKKIFLSKLIVCFLSTWLPFVLLQVIIVLLKVQIPAYIEMNIPWLYFVNSFLIATVYWFNCHKLNLKDIGLPLDPFVNWKCCFIPLTIPNLEQIEKPISIMIC

SEQ ID NO: 159 - DNA, 7808 bp, Homo sapiens
aaaaataacgaaagaaaggcagagaggaagtagcgagagaagagagaaaatgaagtcggcgctgggggagcctgcaggagggtggccaacagtggaggaaggtggatttggcttcttttccgcaccccgggcgtgaaagccctctccaacgcgaccccaggaaataagtgggtctcgcctgggcagaaaaggaaaagaatccaggcgagagcgcgtcgctcctctgtcactgctgcccccgaggaactccggctgcttctcatcccggccgcctcgcggggccggacgcagtgcccgaggcgccctgcagatggggcgggcagggaacgggcgctccagctgcgggtgacaggcgccggcccgcccgcctgcctgctcagcgcagtgaccgggcgggcagaggatgccaggcggagggacctgggagcgggatctgagactgccggaggcgcgctacgctccaacttgcatggcctagagaccgctccagctcctgggaccgcttcaccgagtggagtgaagctgcgcgcgggacctggaggcggagacctcaggcagcggctgcagaggggcgagccgggcgcaggagggggcgcgctttctccctgcgggtctcagtaatgaggagactgagtttgtggtggctgctgagcagggtctgtctgctgttgccgccgccctgcgcactggtgctggccggggtgcccagctcctcctcgcacccgcagccctgccagatcctcaagcgcatcgggcacgcggtgagggtgggcgcggtgcacttgcagccctggaccaccgccccccgcgcggccagccgcgctccggacgacagccgagcaggagcccagagggatgagccggagccagggactaggcggtccccggcgccctcgccgggcgcacgctggttggggagcaccctgcatggccgggggccgccgggctcccgtaagcccggggagggcgccagggcggaggccctgtggccacgggacgccctcctatttgccgtggacaacctgaaccgcgtggaagggctgctaccctacaacctgtctttggaagtagtgatggccatcgaggcaggcctgggcgatctgccacttttgcccttctcctcccctagttcgccatggagcagtgaccctttctccttcctgcaaagtgtgtgccataccgtggtggtgcaaggggtgtcggcgctgctcgccttcccccagagccagggcgaaatgatggagctcgacttggtcagcttagtcctgcacattccagtgatcagcatcgtgcgccacgagtttccgcgggagagtcagaatccccttcacctacaactgagtttagaaaattcattaagttctgatgctgatgtcactgtctcaatcctgaccatgaacaactggtacaattttagcttgttgctgtgccaggaagactggaacatcaccgacttcctcctccttacccagaataattccaagttccaccttggttctatcatcaacatcaccgctaacctcccctccacccaggacctcttgagcttcctacagatccagcttgagagtattaagaacagcacacccacagtggtgatgtttggctgcgacatggaaagtatccggcggattttcgaaattacaacccagtttggggtcatgccccctgaacttcgttgggtgctgggagattcccagaatatggaggaactgaggacagagggtctgcccttaggactcattgctcatggaaaaacaacacagtctgtctttgagcactacgtacaagatgctatggagctggtcgcaagagctgtagccacagccaccatgatccaaccagaacttgctctcattcccagcacgatgaactgcatggaggtggaaactacaaatctcacttcaggacaatatttatcaaggtttctagccaataccactttcagaggcctcagtggttccatcagagtaaaaggttccaccatcgtcagctcagaaaacaactttttcatctggaatcttcaacatgaccccatgggaaagccaatgtggacccgcttgggcagctggcaggggagaaagattgtcatggactatggaatatggccagagcaggcccagagacacaaaacccacttccaacatccaagtaagctacacttgagagtggttaccctgattgagcatccttttgtcttcacaagggaggtagatgatgaaggcttgtgccctgctggccaactctgtctagaccccatgactaatgactcttccacactggacagcctttttagcagcctccatagcagtaatgatacagtgcccattaaattcaagaagtgctgctatggatattgcattgatctgctggaaaagatagcagaagacatgaactttgacttcgacctctatattgtaggggatggaaagtatggagcatggaaaaatgggcactggactgggctagtgggtgatctcctgagagggactgcccacatggcagtcacttcctttagcatcaatactgcacggagccaggtgatagatttcaccagccctttcttctccaccagcttgggcatcttagtgaggacccgagatacagcagctcccattggagccttcatgtggccactccactggacaatgtggctggggatttttgtggctctgcacatcactgccgtcttcctcactctgtatgaatggaagagtccatttggtttgactcccaaggggcgaaatagaagtaaagtcttctccttttcttcagccttgaacatctgttatgccctcttgtttggcagaacagtggccatcaaacctccaaaatgttggactggaaggtttctaatgaacctttgggccattttctgtatgttttgcctttccacatacacggcaaacttggctgctgtcatggtaggtgagaagatctatgaagagctttctggaatacatgaccccaagttacatcatccttcccaaggattccgctttggaactgtccgagaaagcagtgctgaagattatgtgagacaaagtttcccagagatgcatgaatatatgagaaggtacaatgttccagccacccctgatggagtggagtatctgaagaatgatccagagaaactagacgccttcatcatggacaaagcccttctggattatgaagtgtcaatagatgctgactgcaaacttctcactgtggggaagccatttgccatagaaggatacggcattggcctcccacccaactctccattgaccgccaacatatccgagctaatcagtcaatacaagtcacatgggtttatggatatgctccatgacaagtggtacagggtggttccctgtggcaagagaagttttgctgtcacggagactttgcaaatgggcatcaaacacttctctgggctctttgtgctgctgtgcattggatttggtctgtccattttgaccaccattggtgagcacatagtatacaggctgctgctaccacgaatcaaaaacaaatccaagctgcaatactggctccacaccagccagagattacacagagcaataaatacatcatttatagaggaaaagcagcagcatttcaagaccaaacgtgtggaaaagaggtctaatgtgggaccccgtcagcttaccgtatggaatacttccaatctgagtcatgacaaccgacggaaatacatctttagtgatgaggaaggacaaaaccagctgggcatccggatccaccaggacatccccctccctccaaggagaagagagctccctgccttgcggaccaccaatgggaaagcagactccctaaatgtatctcggaactcagtgatgcaggaactctcagagctcgagaagcagattcaggtgatccgtcaggagctgcagctggctgtgagcaggaaaacggagctggaggagtatcaaaggacaagtcggacttgtgagtcctaggtgaccacactgcttccctttctcagttcctgaccttcctctgagcccttgagacactttgtaatgctcttttgtaactatcgacaaaggtgtggggaagctgaggtctaggtcttcttaaaggtcaagtctgctctccctcgcctaaagtgcagcagcagctcctctcaagctcactctctaggtctccagggtaggagtgtttttctagcaagaatcttagtcaggagtaagctctgtgcgagagatctgtgaataaccagataaccccagctgccgttaaccttttcaccaggtgccacagtaatatttctggtttttagccctttctctgcactaccaacaagagataaaattgttactcacacttatgtcttactgggttgctggttttcatcgtaacacagaacgaggttatctagggttgtagcttttgatacaactccccgatctagatttattcctacattctgaatggggagcaggtaagagcagagcacctcccactgggggtggggtatttaaaaattaactcattagtatcataaacgtcaaggattgattggaccaggcaagagccatgtttttgagaaggttctggatctctgactccatcctgactgtttagtaagagcatgcttacaccctactgtgaaaaggggaggggatgtggtaagcggaaacagaagacaggcagcagaggcattaaaaatgcataccatgctttcagaacaaaagctctgggccagaaaggcaatttggctaaaaaatgaataagactacttctaatgtaactaagcatctccactatggtgtgtgccttttataaaggaaaagagagaaaaaggcaaagcaaggttgtggccttaggttggacctggaatatcccttattgcctataatggaatatgtgacactgtgggtgaaatgttctacacaccacacactaggccattttcagatcagcagtcacccatcgcttagcatagaaatcccaaaacctccagcccgggaacactataagcttcgaccattcaggaatctgccctgcactttgcatatctgtatagaaaatcaagtcaatcccccatcctcacacccactcatctctgaggagctatgaactggttttggtccctctaatgatcctccagcctcatctaatgccccccaaagactgatacaagtaacctcccctctgcttaggtgtcactttctcagcatatcaagtttaggcagcaagggaaaggaatatgggtcagttctcaaatgtcaatgtagataagagtcatctagtagagaactcatcagagtgcggattgccaagacccttctccagagattatggggttgggggtggaggtctagaggtgagctcagaaacctactgttaaccaacacccccaagtgactgacacaggtggtctaaaaattacttttctagaaacaccattctggaagtttggctgcccacaggcaggaggagaagcatgaagagaaaacctgtttgagaagttttgttttgttttgttttgctttttaataattttagcacacatctgctgactctccttcaacatcctcacccccacccctgggcaccatttaggacaagacttccttatttatcaattacttgatttatcttctcaggactcattgttccacccccaaccaatttgaatgcctacaataagttcaggagctgtgccaagcactttcctcttttacagctggagatcactggaaaggtgtctcagtcacaaaacttctccctctactactggatgaaatgtctgcatttccaccaaaatctacccagtcacccagggaataacaacttaagctgtagttagataacacctagtgattaattggctgagaaaaccctggagtggagggaggctcagagatactgatatggatgtgggagggctctaaagttagaggtcaccaactccacagatgaaacagttcaataatgaggaaacaggtgagccctgaaaacacaaaaggacagttctgtgttgaaacaccccatcccctcacgttctcaccccaggcccagaagtaggttgcaactgcctttggaagattttgccccttagccatccccacccacttgtaccagctaagaatgctggagactctgccaccatgctctgcgtgcccctgaacctctgtgcagcccggaaggctgatgtacaggtgtacctcaatccacattacagccatgctcctaatgtacatggacatttttgtaactcagctcatattctgactgtatttgagaagctggctgtttaagggaacccagaagtgaattcttttgtaaagtaaagcacccttttgtaatgcaattaattatcccttaatgtatctgttttgtaagtctgcatttttgtatatcggatttaccttaagcttctctagtgaggcattctgagcagtggtgatcacatgccagatcgccctgcctatccacaaagtagatgaccaatgcacgctcctcaaacatctttggaggaactacctggccaaaacactggccaggatgcagcaagcagcagcaggggctgacagcaggcttactgccatcaacattgcttgaaatgcctctatgttctgaataaagaaaaaccataattgcttgtggtgaaacgaagcagtcttcatgttaagtagcaatggttatttttattggtagtaactgaacagtgttttgcaatttgtgaaacagtgtattgtgttttgtaaaatgatgtcatgaaatggtgggtccttggaaacctcctttccgttcagctctgcctctgttctttcaactcctttgaggctcaaaaaaaacacaaagatcagaagccttcagatagagggtggtattctggtaaagaagaaagagataagggacgctaccttgcttttctggcacaggaagcacatgataaagcatgctcagatgagctggaacagatatagctacctggttcgtgtaaataagaataatcaaggccccagagtgtgtatgcttccaggtggaggagaaaggggaatctcccaaaatttaaaaacaaattggaagaataaccaggacagccaagtgaagcagccacagggacccaagcagtcgaggtctttaatgtgcctggagatgactctctgctattcatgaatcttgctattgcacaaaccctatcaagagctgctgcttcccttccagccagaaaagtggtaagcggagcaagtgccaagcagaacagaccttatcatctgggtaacagacttctcagtgttggtgctgtgtctgttagagccttagagcaagttaagcacttccttggtgtgggtaaagaataaaggggaaagaaactactttagagcctctttttctcccaactcatatttttgataggaaaaacagaaaacccatccagttcttcagaaattgctttctaggcattaatactactttactatctatactgtttagttattcctttctttacccacctaaactatccatctaatccaggattccctcactctttttttttagttactaatcattttatgaaaataatgtatttataagtattttcttaaggtttgtgaagagtatttgcattgtgtcttcattttaatgtgtttgcaatcgctccgctccaggaagaacggaaatgctgtcttgtgagcatgaagtgaacgggctgttttgctccagccacttttcttgtacaaccacatggatggattagatgtcctcaggtcttttccatcttcagtttctatgactgtggaataaatgttcagatagaaacttcaaaaaaaaaaaaaaaaaaa

SEQ ID NO: 160 - protein, 1115 aa, Homo sapiens [sequence omitted]

SEQ ID NO: 161 - DNA, 3017 bp, Homo sapiens
ttatggcgattgggcggctgcagagaccaggactcagttcccctgccctagtctgagcctagtgggtgggactcagctcagagtcagttttccagaagcaggtttcagtgcagagttttcctacacttttcctgcgctagagcagcgagcagcctggaacagacccaggcggaggacacctgtgggggagggagcgcctggaggagcttagagaccccagccgggcgtgatctcaccattgcggatttgcgaggcgcgccctggagctgctagagatccggaagcacagccccgaggtgtgcgaagccaccaagactgcggctcttggagaaagcgtgagcagggggccaccgcggtctccgcgcctgtctgcaccctgtcgcctgagctgcctgacagtgacaatgacatcccagttaccagtgtccttgaattgatagtggcttctgtttgtcagtctcatataagaactacagctcatcaggaggagatcgcagcagggtaagagacaccaacaccatgttctgcacgaagctcaaggatctcaagatcacaggagagtgtcctttctccttactggcaccaggtcaagttcctaacgagtcttcagaggaggcagcaggaagctcagagagctgcaaagcaaccgtgcccatctgtcaagacattcctgagaagaacatacaagaaagtcttcctcaaagaaaaaccagtcggagccgagtctatcttcacactttggcagagagtatttgcaaactgattttcccagagtttgaacggctgaatgttgcacttcagagaacattggcaaagcacaaaataaaagaaagcaggaaatctttggaaagagaagactttgaaaaaacaattgcagagcaagcagttgcagcaggagttccagtggaggttatcaaagaatctcttggtgaagaggtttttaaaatatgttacgaggaagatgaaaacatccttggggtggttggaggcacccttaaagattttttaaacagcttcagtacccttctgaaacagagcagccattgccaagaagcaggaaaaaggggcaggcttgaggacgcctccattctatgcctggataaggaggatgattttctacatgtttactacttcttccctaagagaaccacctccctgattcttcccggcatcataaaggcagctgctcacgtattatatgaaacggaagtggaagtgtcgttaatgcctccctgcttccataatgattgcagcgagtttgtgaatcagccctacttgttgtactccgttcacatgaaaagcaccaagccatccctgtcccccagcaaaccccagtcctcgctggtgattcccacatcgctattctgcaagacatttccattccatttcatgtttgacaaagatatgacaattctgcaatttggcaatggcatcagaaggctgatgaacaggagagactttcaaggaaagcctaattttgaagaatactttgaaattctgactccaaaaatcaaccagacgtttagcgggatcatgactatgttgaatatgcagtttgttgtacgagtgaggagatgggacaactctgtgaagaaatcttcaagggttatggacctcaaaggccaaatgatctacattgttgaatccagtgcaatcttgtttttggggtcaccctgtgtggacagattagaagattttacaggacgagggctctacctctcagacatcccaattcacaatgcactgagggatgtggtcttaataggggaacaagcccgagctcaagatggcctgaagaagaggctggggaagctgaaggctacccttgagcaagcccaccaagccctggaggaggagaagaaaaagacagtagaccttctgtgctccatatttccctgtgaggttgctcagcagctgtggcaagggcaagttgtgcaagccaagaagttcagtaatgtcaccatgctcttctcagacatcgttgggttcactgccatctgctcccagtgctcaccgctgcaggtcatcaccatgctcaatgcactgtacactcgcttcgaccagcagtgtggagagctggatgtctacaaggtggagaccattggcgatgcctattgtgtagctgggggattacacaaagagagtgatactcatgctgttcagatagcgctgatggccctgaagatgatggagctctctgatgaagttatgtctccccatggagaacctatcaagatgcgaattggactgcactctggatcagtttttgctggcgtcgttggagttaaaatgccccgttactgtctttttggaaacaatgtcactctggctaacaaatttgagtcctgcagtgtaccacgaaaaatcaatgtcagcccaacaacttacagattactcaaagactgtcctggtttcgtgtttacccctcgatcaagggaggaacttccaccaaacttccctagtgaaatccccggaatctgccattttctggatgcttaccaacaaggaacaaactcaaaaccatgcttccaaaagaaagatgtggaagatggcaatgccaattttttaggcaaagcatcaggaatagattagcaacctatatacctatttataagtctttggggtttgactcattgaagatgtgtagagcctctgaaagcactttagggattgtagatggctaacaagcagtattaaaatttcaggagccaagtcacaatctttctcctgtttaacatgacaaaatgtatgtactcacttcagtacttcagctcttcaagaaaaaaaaaaaaaaccttaaaaagctacttttgtgggagtatttctattatataaccagcacttactacctgtactcaaaattcagcaccttgtacatatatcagataattgtagtcaattgtacaaactgatggagtcacctgcaatctcatatcctggtggaatgccatggttattaaagtgtgtttgtgatagttgtcgtcaaaaaaaaaaaaaaaaaaaaaaaaaaaaaaaaa

SEQ ID NO: 162 - protein, 690 aa, Homo sapiens
MFCTKLKDLKITGECPFSLLAPGQVPNESSEEAAGSSESCKATVPICQDIPEKNIQESLPQRKTSRSRVYLHTLAESICKLIFPEFERLNVALQRTLAKHKIKESRKSLEREDFEKTIAEQAVAAGVPVEVIKESLGEEVFKICYEEDENILGVVGGTLKDFLNSFSTLLKQSSHCQEAGKRGRLEDASILCLDKEDDFLHVYYFFPKRTTSLILPGIIKAAAHVLYETEVEVSLMPPCFHNDCSEFVNQPYLLYSVHMKSTKPSLSPSKPQSSLVIPTSLFCKTFPFHFMFDKDMTILQFGNGIRRLMNRRDFQGKPNFEEYFEILTPKINQTFSGIMTMLNMQFVVRVRRWDNSVKKSSRVMDLKGQMIYIVESSAILFLGSPCVDRLEDFTGRGLYLSDIPIHNALRDVVLIGEQARAQDGLKKRLGKLKATLEQAHQALEEEKKKTVDLLCSIFPCEVAQQLWQGQVVQAKKFSNVTMLFSDIVGFTAICSQCSPLQVITMLNALYTRFDQQCGELDVYKVETIGDAYCVAGGLHKESDTHAVQIALMALKMMELSDEVMSPHGEPIKMRIGLHSGSVFAGVVGVKMPRYCLFGNNVTLANKFESCSVPRKINVSPTTYRLLKDCPGFVFTPRSREELPPNFPSEIPGICHFLDAYQQGTNSKPCFQKKDVEDGNANFLGKASGID

SEQ ID NO: 163 - DNA, 2850 bp, Homo sapiens
cggtgcggagaaggggaggaggcgggcagaggtctgaaaaaatcgaatgccttatggaaaggaactgcaagggttcctttggggtgatcaaagagggagacacagacacagagagacaaaggcaaggaggactgtctgggagccacgcgggcgatacagtttccgaggcacgccgcgtcccgcctagcctgttgaacagtgcggatttgcgaggcgcgccctggagctgctagagatccggaagcacagccccgaggtgtgcgaagccaccaaacatcccagttaccagtgtccttgaattgatagtggcttctgtttgtcagtctcatataagaactacagctcatcaggaggagatcgcagcagggtaagagacaccaacaccatgttctgcacgaagctcaaggatctcaagatcacaggagagtgtcctttctccttactggcaccaggtcaagttcctaacgagtcttcagaggaggcagcaggaagctcagagagctgcaaagcaaccgtgcccatctgtcaagacattcctgagaagaacatacaagaaagtcttcctcaaagaaaaaccagtcggagccgagtctatcttcacactttggcagagagtatttgcaaactgattttcccagagtttgaacggctgaatgttgcacttcagagaacattggcaaagcacaaaataaaagaaagcaggaaatctttggaaagagaagactttgaaaaaacaattgcagagcaagcagttgcagcaggagttccagtggaggttatcaaagaatctcttggtgaagaggtttttaaaatatgttacgaggaagatgaaaacatccttggggtggttggaggcacccttaaagattttttaaacagcttcagtacccttctgaaacagagcagccattgccaagaagcaggaaaaaggggcaggcttgaggacgcctccattctatgcctggataaggaggatgattttctacatgtttactacttcttccctaagagaaccacctccctgattcttcccggcatcataaaggcagctgctcacgtattatatgaaacggaagtggaagtgtcgttaatgcctccctgcttccataatgattgcagcgagtttgtgaatcagccctacttgttgtactccgttcacatgaaaagcaccaagccatccctgtcccccagcaaaccccagtcctcgctggtgattcccacatcgctattctgcaagacatttccattccatttcatgtttgacaaagatatgacaattctgcaatttggcaatggcatcagaaggctgatgaacaggagagactttcaaggaaagcctaattttgaagaatactttgaaattctgactccaaaaatcaaccagacgtttagcgggatcatgactatgttgaatatgcagtttgttgtacgagtgaggagatgggacaactctgtgaagaaatcttcaagggttatggacctcaaaggccaaatgatctacattgttgaatccagtgcaatcttgtttttggggtcaccctgtgtggacagattagaagattttacaggacgagggctctacctctcagacatcccaattcacaatgcactgagggatgtggtcttaataggggaacaagcccgagctcaagatggcctgaagaagaggctggggaagctgaaggctacccttgagcaagcccaccaagccctggaggaggagaagaaaaagacagtagaccttctgtgctccatatttccctgtgaggttgctcagcagctgtggcaagggcaagttgtgcaagccaagaagttcagtaatgtcaccatgctcttctcagacatcgttgggttcactgccatctgctcccagtgctcaccgctgcaggtcatcaccatgctcaatgcactgtacactcgcttcgaccagcagtgtggagagctggatgtctacaaggtggagaccattggcgatgcctattgtgtagctgggggattacacaaagagagtgatactcatgctgttcagatagcgctgatggccctgaagatgatggagctctctgatgaagttatgtctccccatggagaacctatcaagatgcgaattggactgcactctggatcagtttttgctggcgtcgttggagttaaaatgccccgttactgtctttttggaaacaatgtcactctggctaacaaatttgagtcctgcagtgtaccacgaaaaatcaatgtcagcccaacaacttacagattactcaaagactgtcctggtttcgtgtttacccctcgatcaagggaggaacttccaccaaacttccctagtgaaatccccggaatctgccattttctggatgcttaccaacaaggaacaaactcaaaaccatgcttccaaaagaaagatgtggaagatggcaatgccaattttttaggcaaagcatcaggaatagattagcaacctatatacctatttataagtctttggggtttgactcattgaagatgtgtagagcctctgaaagcactttagggattgtagatggctaacaagcagtattaaaatttcaggagccaagtcacaatctttctcctgtttaacatgacaaaatgtatgtactcacttcagtacttcagctcttcaagaaaaaaaaaaaaaaccttaaaaagctacttttgtgggagtatttctattatataaccagcacttactacctgtactcaaaattcagcaccttgtacatatatcagataattgtagtcaattgtacaaactgatggagtcacctgcaatctcatatcctggtggaatgccatggttattaaagtgtgtttgtgatagttgtcgtc

SEQ ID NO: 164 - DNA, 2871 bp, Homo sapiens
cggtgcggagaaggggaggaggcgggcagaggtctgaaaaaatcgaatgccttatggaaaggaactgcaagggttcctttggggtgatcaaagagggagacacagacacagagagacaaaggcaaggaggactgtctgggagccacgcgggcgatacagtttccgaggcacgccgcgtcccgcctagcctgttgaacaggtagacatgagcgacccaagctgcggatttgcgaggcgcgccctggagctgctagagatccggaagcacagccccgaggtgtgcgaagccaccaaacatcccagttaccagtgtccttgaattgatagtggcttctgtttgtcagtctcatataagaactacagctcatcaggaggagatcgcagcagggtaagagacaccaacaccatgttctgcacgaagctcaaggatctcaagatcacaggagagtgtcctttctccttactggcaccaggtcaagttcctaacgagtcttcagaggaggcagcaggaagctcagagagctgcaaagcaaccgtgcccatctgtcaagacattcctgagaagaacatacaagaaagtcttcctcaaagaaaaaccagtcggagccgagtctatcttcacactttggcagagagtatttgcaaactgattttcccagagtttgaacggctgaatgttgcacttcagagaacattggcaaagcacaaaataaaagaaagcaggaaatctttggaaagagaagactttgaaaaaacaattgcagagcaagcagttgcagcaggagttccagtggaggttatcaaagaatctcttggtgaagaggtttttaaaatatgttacgaggaagatgaaaacatccttggggtggttggaggcacccttaaagattttttaaacagcttcagtacccttctgaaacagagcagccattgccaagaagcaggaaaaaggggcaggcttgaggacgcctccattctatgcctggataaggaggatgattttctacatgtttactacttcttccctaagagaaccacctccctgattcttcccggcatcataaaggcagctgctcacgtattatatgaaacggaagtggaagtgtcgttaatgcctccctgcttccataatgattgcagcgagtttgtgaatcagccctacttgttgtactccgttcacatgaaaagcaccaagccatccctgtcccccagcaaaccccagtcctcgctggtgattcccacatcgctattctgcaagacatttccattccatttcatgtttgacaaagatatgacaattctgcaatttggcaatggcatcagaaggctgatgaacaggagagactttcaaggaaagcctaattttgaagaatactttgaaattctgactccaaaaatcaaccagacgtttagcgggatcatgactatgttgaatatgcagtttgttgtacgagtgaggagatgggacaactctgtgaagaaatcttcaagggttatggacctcaaaggccaaatgatctacattgttgaatccagtgcaatcttgtttttggggtcaccctgtgtggacagattagaagattttacaggacgagggctctacctctcagacatcccaattcacaatgcactgagggatgtggtcttaataggggaacaagcccgagctcaagatggcctgaagaagaggctggggaagctgaaggctacccttgagcaagcccaccaagccctggaggaggagaagaaaaagacagtagaccttctgtgctccatatttccctgtgaggttgctcagcagctgtggcaagggcaagttgtgcaagccaagaagttcagtaatgtcaccatgctcttctcagacatcgttgggttcactgccatctgctcccagtgctcaccgctgcaggtcatcaccatgctcaatgcactgtacactcgcttcgaccagcagtgtggagagctggatgtctacaaggtggagaccattggcgatgcctattgtgtagctgggggattacacaaagagagtgatactcatgctgttcagatagcgctgatggccctgaagatgatggagctctctgatgaagttatgtctccccatggagaacctatcaagatgcgaattggactgcactctggatcagtttttgctggcgtcgttggagttaaaatgccccgttactgtctttttggaaacaatgtcactctggctaacaaatttgagtcctgcagtgtaccacgaaaaatcaatgtcagcccaacaacttacagattactcaaagactgtcctggtttcgtgtttacccctcgatcaagggaggaacttccaccaaacttccctagtgaaatccccggaatctgccattttctggatgcttaccaacaaggaacaaactcaaaaccatgcttccaaaagaaagatgtggaagatggcaatgccaattttttaggcaaagcatcaggaatagattagcaacctatatacctatttataagtctttggggtttgactcattgaagatgtgtagagcctctgaaagcactttagggattgtagatggctaacaagcagtattaaaatttcaggagccaagtcacaatctttctcctgtttaacatgacaaaatgtatgtactcacttcagtacttcagctcttcaagaaaaaaaaaaaaaaccttaaaaagctacttttgtgggagtatttctattatataaccagcacttactacctgtactcaaaattcagcaccttgtacatatatcagataattgtagtcaattgtacaaactgatggagtcacctgcaatctcatatcctggtggaatgccatggttattaaagtgtgtttgtgatagttgtcgtc

SEQ ID NO: 165 - DNA, 1077 bp, Homo sapiens
accgcatcctagccgccgactcacacaaggcaggtgggtgaggaaatccagagttgccatggagaaaattccagtgtcagcattcttgctccttgtggccctctcctacactctggccagagataccacagtcaaacctggagccaaaaaggacacaaaggactctcgacccaaactgccccagaccctctccagaggttggggtgaccaactcatctggactcagacatatgaagaagctctatataaatccaagacaagcaacaaacccttgatgattattcatcacttggatgagtgcccacacagtcaagctttaaagaaagtgtttgctgaaaataaagaaatccagaaattggcagagcagtttgtcctcctcaatctggtttatgaaacaactgacaaacacctttctcctgatggccagtatgtccccaggattatgtttgttgacccatctctgacagttagagccgatatcactggaagatattcaaatcgtctctatgcttacgaacctgcagatacagctctgttgcttgacaacatgaagaaagctctcaagttgctgaagactgaattgtaaagaaaaaaaatctccaagcccttctgtctgtcaggccttgagacttgaaaccagaagaagtgtgagaagactggctagtgtggaagcatagtgaacacactgattaggttatggtttaatgttacaacaactattttttaagaaaaacatgttttagaaatttggtttcaagtgtacatgtgtgaaaacaatattgtatactaccatagtgagccatgattttctaaaaaaaaaataaatgttttgggggtgttctgttttctccaacttggtctttcacagtggttcgtttaccaaataggattaaacacacacaaaatgctcaaggaagggacaagacaaaaccaaaactagttcaaatgatgaagaccaaagaccaagttatcatctcaccacaccacaggttctcactagatgactgtaagtagacacgagcttaatcaacagaagtatcaagccatgtgctttagcataaaaaaaaaaaaaaaaaa

SEQ ID NO: 166 - protein, 175 aa, Homo sapiens
MEKIPVSAFLLLVALSYTLARDTTVKPGAKKDTKDSRPKLPQTLSRGWGDQLIWTQTYEEALYKSKTSNKPLMIIHHLDECPHSQALKKVFAENKEIQKLAEQFVLLNLVYETTDKHLSPDGQYVPRIMFVDPSLTVRADITGRYSNRLYAYEPADTALLLDNMKKALKLLKTEL

SEQ ID NO: 167 - DNA, 2423 bp, Homo sapiens
cttcgtgactagtgaggtgcgcaaacgcccgagttttccctggtgcgcgggttccgcctttgcagtgccctccacccttcctggtgtctgacccgcctccttcccaggccttttgttcctgtcccggaaagccggcgtcctgccgcgcgatgcccctgctcggacttcttcccaggagggcctgggcttcgctgctcagccagctcctgcgaccgccctgcgcttcgtgcaccggggcggtccgttgccaaagccaggttgcagaggcagtgttaacatcccaactgaaagcacatcaagagaaaccaaattttattatcaagaccccaaagggtaccagggatcttagtcctcagcatatggttgtgagggagaaaattcttgatttggttatcagctgctttaaacgtcatggagcaaaggggatggacaccccagcatttgagctgaaggaaaccctgactgagaagtatggagaggactctgggctcatgtatgatctgaaggatcaaggtggagagctgttgtccctccgctatgaccttactgttccctttgctcgttatctggccatgaataaggtgaagaagatgaaacgttatcatgttggaaaggtgtggcggcgagagagcccaaccatagtccaaggccgttatagggagttctgccagtgtgattttgacattgctggtcagtttgaccctatgatccccgatgcagagtgtttgaagatcatgtgtgaaatcctaagtggattgcagttgggagactttctcattaaggtaaatgaccggcggattgtggatgggatgtttgctgtctgtggtgttcctgaaagcaagttccgtgccatctgctcctccatagataaactagacaagatggcttggaaagatgtgagacatgagatggtggtgaagaaaggcctggctcctgaggtggctgatcgaattggggactatgtccagtgtcatggtggggtatccctagtagagcaaatgtttcaggatcccagactatcccagaacaagcaggccctggagggcctgggagacctaaagctgctatttgaatacctgactttatttggaattgctgataagatctcctttgacctcagcctggctcggggcctagactactatacaggagtgatctatgaagcagtgctgctgcagaccccaactcaggctggggaggagcccctgaatgtgggcagtgtggctgctggtgggcgctatgatgggctggtgggcatgtttgaccccaagggccacaaggtgccatgtgtgggactcagcattggggttgagcgaatcttctacattgtggagcagaggatgaagaccaaaggtgagaaggtgcggactacagagactcaagtgtttgtggccacaccacagaagaactttctccaagaacggttgaagcttattgcagagctttgggattctggaatcaaggcagagatgctatacaagaacaaccccaaactattaacccagctgcactattgtgagagcacaggcattccactggtggtcattattggtgagcaagaactgaaagaaggggtcatcaagatccgttcagtggccagcagagaggaggtggccattaaacgggaaaattttgtggctgaaattcagaagcgactgtctgagtcttgatccttgcctgattcccatctgctgctctttgtagaaaaggtttcctctagaactgaattcctctggaattgagtgatggacttcacaacaactagccaggaagggtgacaagtaccttctgcctcctccattcttcctgggtgcagaactgtagaagaccctgaggactcctgggctagtgtgagcagctattctgcatgggtgcagatgactggatgtgaaagagacatgctctagctgcagaggcaaatttgaagtgccacggaacgttgtcaagaggtagtgagattgttgctgtgagcaaggctctgggagagtcacctcaggctcaggattctgaaccattgagatcagaaaccagatacttagccttctactgtagctacggaaccagattctggtgaatttgtccacaatcagccattggcctgtctggggagtttttggaagacagcaaagaggggcaatggctgctttcagctttgaggacagatgctatcctaagggcatggcagtacccatgttgatttgacatctctctagcccatccattgcttacagtagaagagtggggctgtatgcttgataatcttgaacattgaacttaatagatgacttgacaaggtagagatctgatattttgagattttggagaccatttcctgtgccagaatcactgctctattccataccgtgccatggaggctgttttagaagtggttggataacatgttaaataaaatattaagtgta

SEQ ID NO: 168 - protein, 506 aa, Homo sapiens
MPLLGLLPRRAWASLLSQLLRPPCASCTGAVRCQSQVAEAVLTSQLKAHQEKPNFIIKTPKGTRDLSPQHMVVREKILDLVISCFKRHGAKGMDTPAFELKETLTEKYGEDSGLMYDLKDQGGELLSLRYDLTVPFARYLAMNKVKKMKRYHVGKVWRRESPTIVQGRYREFCQCDFDIAGQFDPMIPDAECLKIMCEILSGLQLGDFLIKVNDRRIVDGMFAVCGVPESKFRAICSSIDKLDKMAWKDVRHEMVVKKGLAPEVADRIGDYVQCHGGVSLVEQMFQDPRLSQNKQALEGLGDLKLLFEYLTLFGIADKISFDLSLARGLDYYTGVIYEAVLLQTPTQAGEEPLNVGSVAAGGRYDGLVGMFDPKGHKVPCVGLSIGVERIFYIVEQRMKTKGEKVRTTETQVFVATPQKNFLQERLKLIAELWDSGIKAEMLYKNNPKLLTQLHYCESTGIPLVVIIGEQELKEGVIKIRSVASREEVAIKRENFVAEIQKRLSES

SEQ ID NO: 169 - DNA, 1467 bp, Homo sapiens
tcactatagggcgaattggagctccaccgcggtggcggccgctttttttttttttttcgtcactacctccccgggtcgggagtgggtaatttgcgcgcccgctgccttccttggatgtggtagccgtttctcaggctccctctccggaatcgaaccctgattccccgtcacccgtggtcaccatggtaggcacggcgactaccatcgaaagttgatagggcagacgttcgaatgggtcgtcgccgccaccccgcgttaattaacggcgggggggaataagatggcggggaagaagaatgttctgtcgtctctcgcagtttacgcggaagattcagagcccgagtctgatggcgaggctggaatcgaggcggtgggcagcgcggctgaggagaaaggcggattggtatctgatgcctatggggaggatgacttttctcgtctagggggtgatgaagatggttatgaagaagaagaagatgagaacagtagacagtcggaagatgacgattcagagactgaaaaacctgaggctgatgacccaaaggataatacagaagcagaaaagcgagacccccaggaactcgtggcctccttttctgaaagagttcggaacatgtcgcctgatgaaatcaagatcccgccagaaccccctggcagatgttcaaatcacttgcaagacaagatccagaagctttatgaacgaaagataaaggagggaatggatatgaactacattatccaaaggaagaaagaatttcggaaccctagcatctacgagaagctgatccagttctgtgccattgacgagcttggcaccaactacccaaaggatatgtttgatccccatggctggtctgaggactcctactatgaggcattagccaaggcccagaaaattgagatggacaaattggaaaaggccaaaaaggagcgaacaaaaattgagtttgtgacgggcaccaaaaaaggcaccacgaccaacgccacgtccaccaccactaccactgccagcacagctgttgcagatgctcagaagagaaagagcaagtgggattcggctatcccagtgacaacgatagcccagcccaccatcctcaccaccacagccaccctgccagctgttgtcacggtcaccaccagcgccagcggctccaagaccaccgtcatctctgctgtgggcaccattgtgaagaaggccaagcagtgacctgaggggccaccctaggacttgaaaggaccgtgcagcccagtgaccactgcccagtgggaggcgccactttgtatatttcaggactgggacctactccccagatgccacctgagaggagcttctgtttggcattccagatggaaggacaggcagcacgggagccaggcgctgtggacagggtctgtccacgcaccacctggggtctgccgcctattaaaagtgccgtattcttaaaaaaaaaaaaaaaaaaaaaaaaa

SEQ ID NO: 170 - protein, 308 aa, Homo sapiens
MAGKKNVLSSLAVYAEDSEPESDGEAGIEAVGSAAEEKGGLVSDAYGEDDFSRLGGDEDGYEEEEDENSRQSEDDDSETEKPEADDPKDNTEAEKRDPQELVASFSERVRNMSPDEIKIPPEPPGRCSNHLQDKIQKLYERKIKEGMDMNYIIQRKKEFRNPSIYEKLIQFCAIDELGTNYPKDMFDPHGWSEDSYYEALAKAQKIEMDKLEKAKKERTKIEFVTGTKKGTTTNATSTTTTTASTAVADAQKRKSKWDSAIPVTTIAQPTILTTTATLPAVVTVTTSASGSKTTVISAVGTIVKKAKQ

SEQ ID NO: 171 - DNA, 3624 bp, Homo sapiens
gcaggttgggagggaaagtcgggggaggacgcggaagaggagctgtgggaagggggaggagggagggaggaaaagaggaggagacggaggagaactgagcagagcagagcatcgagccaaaggggagatgagtttgtctgtcctctgctgaggctacggccgggcctagggaactgggagcttgggtggaagcgacacccgtggaagtgggaggaggtggcgccgggactttaaccccttgtgggctctgcggcaggggatttaaccctttgtggatctggcccctcggaggcagcgtcatcggtagttttaaccccttcggggctgggtttcacgcactggacttaccctcatcaccttgctcaccaactcctttattggggtgctccgcttggaggtttgaggcccacctccgcccattacgtactgttcctgccgctgcacccccttggacccgctagctggccgcactgtgggcgcttaaccctttactgacttgagctccccagattgcagttggagtttgctgatagaaggactagctaaaggcgtcactgcaggaattacaaactgaagaggactctgttggactgttttttttttctttttcttttttttaagaaaaacccatttttttccttaaggacttactagccaaaatttcttaaacttcgaggactctactagccatggccgagccattcttgtcagaatatcaacaccagcctcaaactagcaactgtacaggtgctgctgctgtccaggaagagctgaaccctgagcgccccccaggcgcggaggagcgggtgcccgaggaggacagtaggtggcaatcgagagcgttcccccagttgggtggccgtccggggccggagggggaagggagcctggaatcccaaccacctcccttgcagacccaggcctgtccagaatctagctgcctgagagagggcgagaagggccagaatggggacgactcgtccgctggcggcgacttcccgccgccggcagaagtggaaccgacgcccgaggccgagctgctcgcccagccttgtcatgactccgaggccagtaagttgggggctcctgccgcagggggcgaagaggagtggggacagcagcagagacagctggggaagaaaaaacataggagacgcccgtccaagaagaagcggcattggaaaccgtactacaagctgacctgggaagagaagaaaaagttcgacgagaaacagagccttcgagcttcaaggatccgagccgagatgttcgccaagggccagccggtcgcgccctataacaccacgcagttcctcatggatgatcacgaccaggaggagccggatctcaaaaccggcctgtactccaagcgggccgccgccaaatccgacgacaccagcgatgacgacttcatggaagaagggggtgaggaggatgggggcagcgatgggatgggaggggacggcagcgagtttctgcagcgggacttctcggagacgtacgagcggtaccacacggagagcctgcagaacatgagcaagcaggagctcatcaaggagtacctggaactggagaagtgcctctcgcgcatggaggacgagaacaaccggctgcggctggagagcaagcggctgggtggcgacgacgcgcgtgtgcgggagctggagctggagctggaccggctgcgcgccgagaacctccagctgctgaccgagaacgaactgcaccggcagcaggagcgagcgccgctttccaagtttggagactagactgaaacttttttgggggagggggcaaaggggactttttacagtgatggaatgtaacattatatacatgtgtatataagacagtggacctttttatgacacataatcagaagagaaatccccctggctttggttggtttcgtaaatttagctatatgtagcttgcgtgctttctcctgttcttttaattatgtgaaactgaagagttgcttttcttgttttcctttttagaagtttttttccttaatgtgaaagtaatttgaccaagttataatgcatttttgtttttaacaaatcccctccttaaacggagctataaggtggccaaatctgagaacaattaaattcattttagttataataaatttaatatttgtaaatgtaacatagtttcagtgtgatttctagagctaattcaaaatagtattgatatattttatgtgactgcatttttggggaggggtaccgaaatcgttaaatttgtcagtttgcaaaaatatcaatctttaatgggagaattttcaatttgccaattttttccttgaatgggtttaagtatgctacaatatacagttcaggcaaaatttaagatgtaattatcttcaatacttaagtgtgcttgctttctagtgccttggttttctttcttgatgctggaaaaataaacaaaccggtattgagtgtttaggcgagtggaaagtggctacaatccaaaattttaaatttaactctgcctcggccattcaaaagtctaataacaaaaaatgtaaacctaatttggcagtttgttaggttagacaactgacagcctcatttcattcctacaagttggttttcagtaatctcttccttccccccagtaaggctggaagaggctcttggcaaacttcttagcgcaagcaatggttagattaatttgtgaggcagctctttaagacgttcagaggtaagaaatactggatttataaagcaaatggctgtttgggggattccaaggatttacctaattgtccaattctacgtgctctctataccaaaacaaaaaaaaagctatccacctttccatgtgggtcaaactaaaattagaaatgtcccctcactgcagatcaaatgtaaagcttccagttaaggagctaaatgaggtcctcagctgaatgaggaaccctgtacatccccttgcacagccctattctaaatcgcttaaactatgctgatagctgcttaggttcttgagtagttctgctcttaaacgtagggaggccctgagaactaaattttgccccaaaataaaaacagaaattatgagattgcctcctgtcattttggttaacccagtccttcacctgccctgtgtcagtgtcttctgagggcaattgcgttgctcaaatcactagcacagaggttccttaatttggggccttagaaaccattgtgggccttggggtccatgaaccccatgaaattatttgtagacttgtatgtacatttttctggggagaaggttcaagagattcataagattgtcaaactccttgaaggttcagaacctctgcagggaagggggaagaaaaccctcccattaggaagcatgcttttgcagttaaatggcgatggtggaggtgatagggacttcaagagtaaaatgcaccttgtattgcataagaagcatacacaaatcaataaatcaagggagattataccagtaggactgaatcagggccttcaaagctggactgagttggtcctgttctggcacatatggtccactggagacaatgtatgattgagcttttctttggtctaaaaattatattaaacatttattttgaaaaaaaaaaaaaaaaaaaaaaaaaaa

SEQ ID NO: 172 - protein, 359 aa, Homo sapiens
MAEPFLSEYQHQPQTSNCTGAAAVQEELNPERPPGAEERVPEEDSRWQSRAFPQLGGRPGPEGEGSLESQPPPLQTQACPESSCLREGEKGQNGDDSSAGGDFPPPAEVEPTPEAELLAQPCHDSEASKLGAPAAGGEEEWGQQQRQLGKKKHRRRPSKKKRHWKPYYKLTWEEKKKFDEKQSLRASRIRAEMFAKGQPVAPYNTTQFLMDDHDQEEPDLKTGLYSKRAAAKSDDTSDDDFMEEGGEEDGGSDGMGGDGSEFLQRDFSETYERYHTESLQNMSKQELIKEYLELEKCLSRMEDENNRLRLESKRLGGDDARVRELELELDRLRAENLQLLTENELHRQQERAPLSKFGD

SEQ ID NO: 173 - DNA, 2058 bp, Homo sapiens
cggtttctgctgggtttctgaactgctgggtttctgcttgctcctctggagatgcagcgtctgttgactccagtgaagcgcattctgcaactgacaagagcggtgcaggaaacctccctcacacctgctcgcctgctcccagtagcccaccaaaggttttctacagcctctgctgtccccctggccaaaacagatacttggccaaaggacgtgggcatcctggccctggaggtctacttcccagcccaatatgtggaccaaactgacctggagaagtataacaatgtggaagcaggaaagtatacagtgggcttgggccagacccgtatgggcttctgctcagtccaagaggacatcaactccctgtgcctgacggtggtgcaacggctgatggagcgcatacagctcccatgggactctgtgggcaggctggaagtaggcactgagaccatcattgacaagtccaaagctgtcaaaacagtgctcatggaactcttccaggattcaggcaatactgatattgagggcatagataccaccaatgcctgctacggtggtactgcctccctcttcaatgctgccaactggatggagtccagttcctgggatggtcgttatgccatggtggtctgtggagacattgccgtctatcccagtggtaatgctcgtcccacaggtggggccggagctgtggctatgctgattggcccaaaggcccctctggccctggagcgagggctgaggggaacccatatggagaatgtgtatgacttctacaaaccaaatttggcctcggagtacccaatagtggatgggaagctttccatccagtgctacttgcgggccttggatcgatgttacacatcataccgtaaaaaaatccagaatcagtggaagcaagctggcagcgatcgacccttcacccttgacgatttacagtatatgatctttcatacacccttttgcaagatggtccagaagtctctggctcgcctgatgttcaatgacttcctgtcagccagcagtgacacacaaaccagcttatataaggggctggaggctttcggggggctaaagctggaagacacctacaccaacaaggacctggataaagcacttctaaaggcctctcaggacatgttcgacaagaaaaccaaggcttccctttacctctccactcacaatgggaacatgtacacctcatccctgtacgggtgcctggcctcgcttctgtcccaccactctgcccaagaactggctggctccaggattggtgccttctcttatggctctggtttagcagcaagtttcttttcatttcgagtatcccaggatgctgctccaggctctcccctggacaagttggtgtccagcacatcagacctgccaaaacgcctagcctcccgaaagtgtgtgtctcctgaggagttcacagaaataatgaaccaaagagagcaattctaccataaggtgaatttctccccacctggtgacacaaacagccttttcccaggtacttggtacctggagcgagtggacgagcagcatcgccgaaagtatgcccggcgtcccgtctaaaggtgttctgcagatccatggaaagcttcctgggaaacgtatgctagcagagcttctccccgtgaatcatatttttaagatcccactcttagctggtaaatgaatttgaatcgacatagtagccccataagcatcagccctgtagagtgaggagccatctctagcgggcccttcattcctctccatgctgcaatcactgtcctgggcttatggtgcctatggactaggggtcctttgtgaaagagcaagatggagcaatggagagaagacctcttcctgaatcactggactccagaaatgtgcatgcagatcagctgttgccttcaagatccagataaactttcctgtcatgtgttagaactttattattattaatattgttaaacttctgtgctgttcctgtgaatctccaaattttgtaccttgttctaagctaatatatagcaattaaaaagagagaaagagaaaaaaaaaaaaaaa

SEQ ID NO: 174 - protein, 508 aa, Homo sapiens
MQRLLTPVKRILQLTRAVQETSLTPARLLPVAHQRFSTASAVPLAKTDTWPKDVGILALEVYFPAQYVDQTDLEKYNNVEAGKYTVGLGQTRMGFCSVQEDINSLCLTVVQRLMERIQLPWDSVGRLEVGTETIIDKSKAVKTVLMELFQDSGNTDIEGIDTTNACYGGTASLFNAANWMESSSWDGRYAMVVCGDIAVYPSGNARPTGGAGAVAMLIGPKAPLALERGLRGTHMENVYDFYKPNLASEYPIVDGKLSIQCYLRALDRCYTSYRKKIQNQWKQAGSDRPFTLDDLQYMIFHTPFCKMVQKSLARLMFNDFLSASSDTQTSLYKGLEAFGGLKLEDTYTNKDLDKALLKASQDMFDKKTKASLYLSTHNGNMYTSSLYGCLASLLSHHSAQELAGSRIGAFSYGSGLAASFFSFRVSQDAAPGSPLDKLVSSTSDLPKRLASRKCVSPEEFTEIMNQREQFYHKVNFSPPGDTNSLFPGTWYLERVDEQHRRKYARRPV

SEQ ID NO: 175 - DNA, 2518 bp, Homo sapiens
ccagcagtggctgcaccatgcacgtgaacggcaaagtggcgctggtgaccggcgcggctcagggcataggcagagcctttgcagaggcgctgctgcttaagggcgccaaggtagcgctggtggattggaatcttgaagcaggtgtacagtgtaaagctgccctgcatgagcaatttgaacctcagaagactctgttcatccagtgcgatgtggctgaccagcaacaactgagagacacttttagaaaagttgtagaccactttggaagactggacattttggtcaataatgctggagtgaataatgagaaaaactgggaaaaaactctgcaaattaatttggtttctgttatcagtggaacctatcttggtttggattacatgagtaagcaaaatggaggtgaaggcggcatcattatcaatatgtcatctttagcaggactcatgcccgttgcacagcagccggtttattgtgcttcaaagcatggcatagttggattcacacgctcagcagcgttggctgctaatcttatgaacagtggtgtgagactgaatgccatttgtccaggctttgttaacacagccatccttgaatcaattgaaaaagaagaaaacatgggacaatatatagaatataaggatcatatcaaggatatgattaaatactatggaattttggacccaccattgattgccaatggattgataacactcattgaagatgatgctttaaatggtgctattatgaagatcacaacttctaagggaattcattttcaagactatgatacaactccatttcaagcaaaaacccaatgaacagcttatgtgttagccatagctgaaaataagcacaaatagcttatattcagatcctatcttcatttgaatatagcttttaaatgaaatgttacagtttgaagttttccttcatgcacttggtgataaacgttttctaaatttttagttaagtatatggataaaaagttatgaactattaaaaatgtgatgtggaccaaaggctaggttgtaatcttgatagtctaaaaaatgatcaaaacaaatgattttcaaggaatattcaatattctgcctttcagaaagtgtatttatatctgtgcttcataaatattaatgttcttcagaacatcattttaaaggagatacttgaattgttatttaaatcaaaccagatgtaaaacactcacatacaagttcatactttaaaagaggaaagctacttaacaatgacaaatatttcacaataataatttttacttatataccatctttcaactgaacatttcagttcttccaagagcttcttagagtagtatattttgggggcagtcaaggaataaactacagtgtaaacatatcccagatgaaaactgctgtatggaaaaatgacagaaagtaactgattgacactgttgattcacagttcagcctcctatctgggaaagacatttctttcctctgctcactttaagaacttttaccgactccaaaaatctcaggaattaaacttttaacagttacagcaataaagaatagttagtactccaaaaatattatatttaagatgctcaacaagaaaaaaatgcaaatgtaatatttttttcaaattacttctttattgacttgtccaaatttcaaaagtgcctacccttcaataaaacttttttattctgatctccataaattacttagtcttctatgtatagctatcaaggaaataaaaccaattttgccacagccacaactgtaaatgtttttgtacccatgctgaaactcataacaacacagacataaaaatagctgtgaggttttgctttttttgttgtcagctatcttaagaatcattaaatacacctgctttgggtaaaactctttgcaagcagtaattaacactagtaacagtgaaagcacaagatttccaaatcagtcgttttctcaaaaaaatatcgtataagtgactcatcctgtctgctaactccagacctcccagcttgaagccaaatctttccatgtgagattgatatggatttcctagaagtactggaatgttgtcatatcttgccctattttaattctgctatagaaaacaattgccttcacttttaaggagtaatttgaatattaataactctggtctagattttcatataatgtattaaagacaaagtagtgaacatcaatgaacatctgatagagataaactgtaatcaggcataagcttgtttgtatgttctggcagtgactaatcagtaaatgatgtcggtttgcccagtatcacttatcttctgtatttttcctctgtcgtgtaaatagtataaccttttcatttatggacaattttttggactagtagccttcaatatacattctgctttgaattaattttttcaaatcaataaattatgtagacatttaaaatcaaatatcaagtagaattgaaaaatgtgagttacataagttaaaaacttactttaaatcttaccttctataggtagctc

SEQ ID NO: 176 - protein, 266 aa, Homo sapiens
MHVNGKVALVTGAAQGIGRAFAEALLLKGAKVALVDWNLEAGVQCKAALHEQFEPQKTLFIQCDVADQQQLRDTFRKVVDHFGRLDILVNNAGVNNEKNWEKTLQINLVSVISGTYLGLDYMSKQNGGEGGIIINMSSLAGLMPVAQQPVYCASKHGIVGFTRSAALAANLMNSGVRLNAICPGFVNTAILESIEKEENMGQYIEYKDHIKDMIKYYGILDPPLIANGLITLIEDDALNGAIMKITTSKGIHFQDYDTTPFQAKTQ

SEQ ID NO: 177 - DNA, 1783 bp, Homo sapiens
tcgagcccgctttccagggaccctacctgagggcccacaggtgaggcagcctggcctagcaggccccacgccaccgcctctgcctccaggccgcccgctgctgcggggccaccatgctcctgcccaggcctggagactgacccgaccccggcactacctcgaggctccgcccccacctgctggaccccagggtcccaccctggcccaggaggtcagccagggaatcattaacaagaggcagtgacatggcgcagaaggagggtggccggactgtgccatgctgctccagacccaaggtggcagctctcactgcggggaccctgctacttctgacagccatcggggcggcatcctgggccattgtggctgttctcctcaggagtgaccaggagccgctgtacccagtgcaggtcagctctgcggacgctcggctcatggtctttgacaagacggaagggacgtggcggctgctgtgctcctcgcgctccaacgccagggtagccggactcagctgcgaggagatgggcttcctcagggcactgacccactccgagctggacgtgcgaacggcgggcgccaatggcacgtcgggcttcttctgtgtggacgaggggaggctgccccacacccagaggctgctggaggtcatctccgtgtgtgattgccccagaggccgtttcttggccgccatctgccaagactgtggccgcaggaagctgcccgtggaccgcatcgtgggaggccgggacaccagcttgggccggtggccgtggcaagtcagccttcgctatgatggagcacacctctgtgggggatccctgctctccggggactgggtgctgacagccgcccactgcttcccggagcggaaccgggtcctgtcccgatggcgagtgtttgccggtgccgtggcccaggcctctccccacggtctgcagctgggggtgcaggctgtggtctaccacgggggctatcttccctttcgggaccccaacagcgaggagaacagcaacgatattgccctggtccacctctccagtcccctgcccctcacagaatacatccagcctgtgtgcctcccagctgccggccaggccctggtggatggcaagatctgtaccgtgacgggctggggcaacacgcagtactatggccaacaggccggggtactccaggaggctcgagtccccataatcagcaatgatgtctgcaatggcgctgacttctatggaaaccagatcaagcccaagatgttctgtgctggctaccccgagggtggcattgatgcctgccagggcgacagcggtggtccctttgtgtgtgaggacagcatctctcggacgccacgttggcggctgtgtggcattgtgagttggggcactggctgtgccctggcccagaagccaggcgtctacaccaaagtcagtgacttccgggagtggatcttccaggccataaagactcactccgaagccagcggcatggtgacccagctctgaccggtggcttctcgctgcgcagcctccagggcccgaggtgatcccggtggtgggatccacgctgggccgaggatgggacgtttttcttcttgggcccggtccacaggtccaaggacaccctccctccagggtcctctcttccacagtggcgggcccactcagccccgagaccacccaacctcaccctcctgacccccatgtaaatattgttctgctgtctgggactcctgtctaggtgcccctgatgatgggatgctctttaaataataaagatggttttgatt

SEQ ID NO: 178 - protein, 417 aa, Homo sapiens
MAQKEGGRTVPCCSRPKVAALTAGTLLLLTAIGAASWAIVAVLLRSDQEPLYPVQVSSADARLMVFDKTEGTWRLLCSSRSNARVAGLSCEEMGFLRALTHSELDVRTAGANGTSGFFCVDEGRLPHTQRLLEVISVCDCPRGRFLAAICQDCGRRKLPVDRIVGGRDTSLGRWPWQVSLRYDGAHLCGGSLLSGDWVLTAAHCFPERNRVLSRWRVFAGAVAQASPHGLQLGVQAVVYHGGYLPFRDPNSEENSNDIALVHLSSPLPLTEYIQPVCLPAAGQALVDGKICTVTGWGNTQYYGQQAGVLQEARVPIISNDVCNGADFYGNQIKPKMFCAGYPEGGIDACQGDSGGPFVCEDSISRTPRWRLCGIVSWGTGCALAQKPGVYTKVSDFREWIFQAIKTHSEASGMVTQL

SEQ ID NO: 179 - DNA, 547 bp, Homo sapiens
acggaagtgtaggttacggtctgagacatcaccgccaagctgggcatcggggagatggccgagactgaccccaagaccgtgcaggacctcacctcggtggtgcagacactcctgcagcagatgcaagataaatttcagaccatgtctgaccagatcattgggagaattgatgatatgagtagtcgcattgatgatctggaaaagaatatcgcggacctcatgacacaggctggggtggaagaactggaaagtgaaaacaagatacctgccacgcaaaagagttgaaggttgctaataatttatactggaatctggcatttttccaagccaagagaagatcgaatggctttttgcagctaactactatgtgtagacaggttttatattataaagtatgcattcttatcacctagtatatagttagtttgtagagtgatttccccccagtttcttgaacatggtatcttcacatcttggaccttggtcagttgtgctattcattattaaacactaaaactttggcggttcttgcataaaaaaaaaaaaa

SEQ ID NO: 180 - protein, 76 aa, Homo sapiens
MAETDPKTVQDLTSVVQTLLQQMQDKFQTMSDQIIGRIDDMSSRIDDLEKNIADLMTQAGVEELESENKIPATQKS

SEQ ID NO: 181 - DNA, 561 bp, Homo sapiens
gagggaccggacgcgagttggagatgttggactcgctgttggccttgggcggcctggtgctgcttcgggattccgtggagtgggaggggcgcagtctcttgaaggcgcttgtcaagaaatctgcactgtgtggggagcaagtgcatatcctgggctgtgaagtgagcgaggaagagtttcgtgaaggttttgactctgatatcaacaatcggctggtttaccatgacttcttcagagaccctctcaactggtcaaaaactgaggaggcctttcctggggggccgctgggagccttgagagccatgtgcaagaggacagatcctgttcctgtcaccattgctctcgattcactcagctggctgctacttcgccttccctgcaccacactctgccaggtcctgcatgctgtgagccatcaggactcttgtcctggtgagacccctccttcattgtttcccctcatacatctccctctgccaaggagtgtgccccttttcctttctaccctagaataaacatctgggttctccagtcagactttaaaaaaaaaaaaaaaaaaaa

SEQ ID NO: 182 - protein, 163 aa, Homo sapiens
MLDSLLALGGLVLLRDSVEWEGRSLLKALVKKSALCGEQVHILGCEVSEEEFREGFDSDINNRLVYHDFFRDPLNWSKTEEAFPGGPLGALRAMCKRTDPVPVTIALDSLSWLLLRLPCTTLCQVLHAVSHQDSCPGETPPSLFPLIHLPLPRSVPLFLSTLE

SEQ ID NO: 183 - DNA, 538 bp, Homo sapiens
gctacactagagcagagtacgagtctgaggcggagggagtaatggcaggacaagcgtttagaaagtttcttccactctttgaccgagtattggttgaaaggagtgctgctgaaactgtaaccaaaggaggcattatgcttccagaaaaatctcaaggaaaagtattgcaagcaacagtagtcgctgttggatcgggttctaaaggaaagggtggagagattcaaccagttagcgtgaaagttggagataaagttcttctcccagaatatggaggcaccaaagtagttctagatgacaaggattatttcctatttagagatggtgacattcttggaaagtacgtagactgaaataagtcactattgaaatggcatcaacatgatgctgcccattccactgaagttctgaaatctttcgtcatgtaaataatttccatatttctcttttataataaactaatgataactaatgacatccagtgtctccaaaattgtttccttgtactgatataaacacttccaaataaaaatatgtaaat

SEQ ID NO: 184 - protein, 102 aa, Homo sapiens
MAGQAFRKFLPLFDRVLVERSAAETVTKGGIMLPEKSQGKVLQATVVAVGSGSKGKGGEIQPVSVKVGDKVLLPEYGGTKVVLDDKDYFLFRDGDILGKYVD

SEQ ID NO: 185 - DNA, 476 bp, Homo sapiens
gaagaattcgccaggctctctgctgactcaagttcttcagttcacgatcttctagttgcagcgatgagtgcacgagtgagatcaagatccagaggaagaggagatggtcaggaggctcccgatgtggttgcattcgtggctcccggtgaatctcagcaagaggaaccaccaactgacaatcaggatattgaacctggacaagagagagaaggaacacctccgatcgaagaacgtaaagtagaaggtgattgccaggaaatggatctggaaaagactcggagtgagcgtggagatggctctgatgtaaaagagaagactccacctaatcctaagcatgctaagactaaagaagcaggagatgggcagccataagttaaaaagaagacaagctgaagctacacacatggctgatgtcacattgaaaatgtgactgaaaatttgaaaattctctcaataaagtttgagttttctctgaa

SEQ ID NO: 186 - protein, 102 aa, Homo sapiens
MSARVRSRSRGRGDGQEAPDVVAFVAPGESQQEEPPTDNQDIEPGQEREGTPPIEERKVEGDCQEMDLEKTRSERGDGSDVKEKTPPNPKHAKTKEAGDGQP

SEQ ID NO: 187 - DNA, 1797 bp, Homo sapiens
ccagcagggagctgggagctgggggaaacgacgccaggaaagctatcgcgccagagagggcgacgggggctcgggaagcctgacagggcttttgcgcacagctgccggctggctgctacccgcccgcgccagcccccgagaacgcgcgaccaggcacccagtccggtcaccgcagcggagagctcgccgctcgctgcagcgaggcccggagcggccccgcagggaccctccccagaccgcctgggccgcccggatgtgcactaaaatggaacagcccttctaccacgacgactcatacacagctacgggatacggccgggcccctggtggcctctctctacacgactacaaactcctgaaaccgagcctggcggtcaacctggccgacccctaccggagtctcaaagcgcctggggctcgcggacccggcccagagggcggcggtggcggcagctacttttctggtcagggctcggacaccggcgcgtctctcaagctcgcctcttcggagctggaacgcctgattgtccccaacagcaacggcgtgatcacgacgacgcctacacccccgggacagtacttttacccccgcgggggtggcagcggtggaggtgcagggggcgcagggggcggcgtcaccgaggagcaggagggcttcgccgacggctttgtcaaagccctggacgatctgcacaagatgaaccacgtgacaccccccaacgtgtccctgggcgctaccggggggcccccggctgggcccgggggcgtctacgccggcccggagccacctcccgtttacaccaacctcagcagctactccccagcctctgcgtcctcgggaggcgccggggctgccgtcgggaccgggagctcgtacccgacgaccaccatcagctacctcccacacgcgccgcccttcgccggtggccacccggcgcagctgggcttgggccgcggcgcctccaccttcaaggaggaaccgcagaccgtgccggaggcgcgcagccgggacgccacgccgccggtgtcccccatcaacatggaagaccaagagcgcatcaaagtggagcgcaagcggctgcggaaccggctggcggccaccaagtgccggaagcggaagctggagcgcatcgcgcgcctggaggacaaggtgaagacgctcaaggccgagaacgcggggctgtcgagtaccgccggcctcctccgggagcaggtggcccagctcaaacagaaggtcatgacccacgtcagcaacggctgtcagctgctgcttggggtcaagggacacgccttctgaacgtcccctgcccctttacggacaccccctcgcttggacggctgggcacacgcctcccactggggtccagggagcaggcggtgggcacccaccctgggacctaggggcgccgcaaaccacactggactccggcccccctaccctgcgcccagtccttccacctcgacgtttacaagcccccccttccacttttttttgtatgttttttttctgctggaaacagactcgattcatattgaatataatatatttgtgtatttaacagggaggggaagagggggcgatcgcggcggagctggccccgccgcctggtactcaagcccgcggggacattgggaaggggacccccgccccctgccctcccctctctgcaccgtactgtggaaaagaaacacgcacttagtctctaaagagtttattttaagacgtgtttgtgtttgtgtgtgtttgttctttttattgaatctatttaagtaaaaaaaaaattggttctttattaa

SEQ ID NO: 188 - protein, 347 aa, Homo sapiens
MCTKMEQPFYHDDSYTATGYGRAPGGLSLHDYKLLKPSLAVNLADPYRSLKAPGARGPGPEGGGGGSYFSGQGSDTGASLKLASSELERLIVPNSNGVITTTPTPPGQYFYPRGGGSGGGAGGAGGGVTEEQEGFADGFVKALDDLHKMNHVTPPNVSLGATGGPPAGPGGVYAGPEPPPVYTNLSSYSPASASSGGAGAAVGTGSSYPTTTISYLPHAPPFAGGHPAQLGLGRGASTFKEEPQTVPEARSRDATPPVSPINMEDQERIKVERKRLRNRLAATKCRKRKLERIARLEDKVKTLKAENAGLSSTAGLLREQVAQLKQKVMTHVSNGCQLLLGVKGHAF

SEQ ID NO: 189 - DNA, 1882 bp, Homo sapiens
gggcaggaagacggcgctgcccggaggagcggggcgggcgggcgcgcgggggagcgggcggcgggcgggagccaggcccgggcgggggcgggggcggcggggccagaagaggcggcgggccgcgctccggccggtctgcggcgttggccttggctttggctttggcggcggcggtggagaagatgctgcagtccctggccggcagctcgtgcgtgcgcctggtggagcggcaccgctcggcctggtgcttcggcttcctggtgctgggctacttgctctacctggtcttcggcgcagtggtcttctcctcggtggagctgccctatgaggacctgctgcgccaggagctgcgcaagctgaagcgacgcttcttggaggagcacgagtgcctgtctgagcagcagctggagcagttcctgggccgggtgctggaggccagcaactacggcgtgtcggtgctcagcaacgcctcgggcaactggaactgggacttcacctccgcgctcttcttcgccagcaccgtgctctccaccacaggttatggccacaccgtgcccttgtcagatggaggtaaggccttctgcatcatctactccgtcattggcattcccttcaccctcctgttcctgacggctgtggtccagcgcatcaccgtgcacgtcacccgcaggccggtcctctacttccacatccgctggggcttctccaagcaggtggtggccatcgtccatgccgtgctccttgggtttgtcactgtgtcctgcttcttcttcatcccggccgctgtcttctcagtcctggaggatgactggaacttcctggaatccttttatttttgttttatttccctgagcaccattggcctgggggattatgtgcctggggaaggctacaatcaaaaattcagagagctctataagattgggatcacgtgttacctgctacttggccttattgccatgttggtagttctggaaaccttctgtgaactccatgagctgaaaaaattcagaaaaatgttctatgtgaagaaggacaaggacgaggatcaggtgcacatcatagagcatgaccaactgtccttctcctcgatcacagaccaggcagctggcatgaaagaggaccagaagcaaaatgagccttttgtggccacccagtcatctgcctgcgtggatggccctgcaaaccattgagcgtaggatttgttgcattatgctagagcaccagggtcagggtgcaaggaagaggcttaagtatgttcatttttatcagaatgcaaaagcgaaaattatgtcactttaagaaatagctactgtttgcaatgtcttattaaaaaacaacaaaaaaagacacatggaacaaagaagctgtgaccccagcaggatgtctaatatgtgaggaaatgagatgtccacctaaaattcatatgtgacaaaattatctcgaccttacataggaggagaatacttgaagcagtatgctgctgtggttagaagcagattttatacttttaactggaaactttggggtttgcatttagatcatttagctgatggctaaatagcaaaatttatatttagaagcaaaaaaaaaaagcatagagatgtgttttataaataggtttatgtgtactggtttgcatgtacccacccaaaatgattatttttggagaatctaagtcaaactcactatttataatgcataggtaaccattaactatgtacatataaagtataaatatgtttatattctgtacatatggtttaggtcaccagatcctagtgtagttctgaaactaagactatagatattttgtttcttttgatttctctttatactaaagaatccagagttgctacaataaaataaggggaataataaa

SEQ ID NO: 190 - protein, 336 aa, Homo sapiens
MLQSLAGSSCVRLVERHRSAWCFGFLVLGYLLYLVFGAVVFSSVELPYEDLLRQELRKLKRRFLEEHECLSEQQLEQFLGRVLEASNYGVSVLSNASGNWNWDFTSALFFASTVLSTTGYGHTVPLSDGGKAFCIIYSVIGIPFTLLFLTAVVQRITVHVTRRPVLYFHIRWGFSKQVVAIVHAVLLGFVTVSCFFFIPAAVFSVLEDDWNFLESFYFCFISLSTIGLGDYVPGEGYNQKFRELYKIGITCYLLLGLIAMLVVLETFCELHELKKFRKMFYVKKDKDEDQVHIIEHDQLSFSSITDQAAGMKEDQKQNEPFVATQSSACVDGPANH

SEQ ID NO: 191 - DNA, 2238 bp, Homo sapiens
gtccttcggtgtctgggtgtggtgagtagaggtgtgtgtcacaaagtacagaccattgtgtgtgacaaagcccatcgtgtgtctgtgtgtgtctttatccacgtggatggacgtctctttcttgctctgccccaagacacaccctagcccctccttattctcaaaagggggagctggggagcctccccctaccctggggcctcccctgcccctccccgccctgcctggccgtcaccactccccagagggcacagggctctgctgtgcctcagagcaaaagtcccagagccagcagagcaggctgacgacctgcaagccacagtggctgccctgtgcgtgctgcgaggtgggggaccctgggcaggaagctggctgagccccaagaccccgggggccatgggcggggatctggtgcttggcctgggggccttgagacgccgaaagcgcttgctggagcaggagaagtctctggccggctgggcactggtgctggcaggaactggcattggactcatggtgctgcatgcagagatgctgtggttcggggggtgctcgtgggcgctctacctgttcctggttaaatgcacgatcagcatttccaccttcttactcctctgcctcatcgtggcctttcatgccaaagaggtccagctgttcatgaccgacaacgggctgcgggactggcgcgtggcgctgaccgggcggcaggcggcgcagatcgtgctggagctggtggtgtgtgggctgcacccggcgcccgtgcggggcccgccgtgcgtgcaggatttaggggcgccgctgacctccccgcagccctggccgggattcctgggccaaggggaagcgctgctgtccctggccatgctgctgcgtctctacctggtgccccgcgccgtgctcctgcgcagcggcgtcctgctcaacgcttcctaccgcagcatcggcgctctcaatcaagtccgcttccgccactggttcgtggccaagctttacatgaacacgcaccctggccgcctgctgctcggcctcacgcttggcctctggctgaccaccgcctgggtgctgtccgtggccgagaggcaggctgttaatgccactgggcacctttcagacacactttggctgatccccatcacattcctgaccatcggctatggtgacgtggtgccgggcaccatgtggggcaagatcgtctgcctgtgcactggagtcatgggtgtctgctgcacagccctgctggtggccgtggtggcccggaagctggagtttaacaaggcagagaagcacgtgcacaacttcatgatggatatccagtataccaaagagatgaaggagtccgctgcccgagtgctacaagaagcctggatgttctacaaacatactcgcaggaaggagtctcatgctgcccgcaggcatcagcgcaagctgctggccgccatcaacgcgttccgccaggtgcggctgaaacaccggaagctccgggaacaagtgaactccatggtggacatctccaagatgcacatgatcctgtatgacctgcagcagaatctgagcagctcacaccgggccctggagaaacagattgacacgctggcggggaagctggatgccctgactgagctgcttagcactgccctggggccgaggcagcttccagaacccagccagcagtccaagtagctggacccacgaggaggaaccaggctactttccccagtactgaggtggtggacatcgtctctgccactcctgacccagccctgaacaaagcacctcaagtgcaaggaccaaagggggccctggcttggagtgggttggcttgctgatggctgctggaggggacgctggctaaagtgggtaggccttggcccacctgaggccccaggtgggaacatggtcacccccactctgcataccctcatcaaaaacactctcactatgctgctatggacgacctccagctctcagttacaagtgcaggcgactggaggcaggactcctgggtccctgggaaagagggtactaggggcccggatccaggattctgggaggcttcagttaccgctggccgagctgaagaactgggtatgaggctggggcggggctggaggtggcgccccctggtgggacaacaaagaggacaccatttttccagagctgcagagagcacctggtggggaggaagaagtgtaactcaccagcctctgctcttatctttgtaataaatgttaaagccag

SEQ ID NO: 192 - protein, 427 aa, Homo sapiens
MGGDLVLGLGALRRRKRLLEQEKSLAGWALVLAGTGIGLMVLHAEMLWFGGCSWALYLFLVKCTISISTFLLLCLIVAFHAKEVQLFMTDNGLRDWRVALTGRQAAQIVLELVVCGLHPAPVRGPPCVQDLGAPLTSPQPWPGFLGQGEALLSLAMLLRLYLVPRAVLLRSGVLLNASYRSIGALNQVRFRHWFVAKLYMNTHPGRLLLGLTLGLWLTTAWVLSVAERQAVNATGHLSDTLWLIPITFLTIGYGDVVPGTMWGKIVCLCTGVMGVCCTALLVAVVARKLEFNKAEKHVHNFMMDIQYTKEMKESAARVLQEAWMFYKHTRRKESHAARRHQRKLLAAINAFRQVRLKHRKLREQVNSMVDISKMHMILYDLQQNLSSSHRALEKQIDTLAGKLDALTELLSTALGPRQLPEPSQQSK

SEQ ID NO: 193 - DNA, 1826 bp, Homo sapiens
cacgtcggctgctgggaagatctggattctcgtttcaggtcaccatcagaaaagctaagtttgctgtatagtgaggatcaggagatctgatcctgattgcagaaccttccctgattacagaatcttggatgatttcacaaaagttcatcttcattgcagatacctgcctttctttctaggttgtatctcccacttcacccttctagaccatcccagaagatctataagatttcatctgggaaatcactaggagttcttggaagggaaagaaggaagattgttggttggaataaaaacagggttgaatgagttccagaaagcagggttctcaacctcgtggacagcaatctgcagaagaagagaacttcaaaaaaccaactagaagcaacatgcagagaagtaaaatgagaggggcctcctcaggaaagaagacagctggtccacagcagaaaaatcttgaaccagctctcccaggaagatggggtggtcgctctgcagagaaccccccttcaggatccgtgaggaagaccagaaagaacaagcagaagactcctggaaacggagatggtggcagtaccagcgaagcacctcagccccctcggaagaaaagggcccgggcagaccccactgttgaaagtgaggaggcgtttaagaatagaatggaggttaaagtgaagattcctgaagaattaaaaccatggcttgttgaggactgggacttagttaccaggcagaagcagctgtttcaactccctgccaagaaaaatgtagatgcaattctggaggagtatgcaaattgcaagaaatcgcagggaaatgttgataataaggaatatgcggttaatgaagttgtggcaggaataaaagaatatttcaatgtgatgttgggcactcagctgctctacaaatttgagaggccccagtatgctgaaatcctcttggctcaccctgatgctccaatgtcccaggtttatggagcaccacacctactgagattatttgtaagaattggagcaatgttggcctatacgccccttgatgagaaaagccttgcattattgttgggctatttgcatgatttcctaaaatatctggcaaagaattctgcatctctctttactgccagtgattacaaagtggcttctgctgagtaccaccgcaaagccctgtgagcgtctacagacagctcaccatttttgtcctgtatctgtaaacactttttgttcttagtctttttcttgtaaaattgatgttctttaaaatcgttaatgtataacagggcttatgtttcagtttgttttccgttctgttttaaacagaaaataaaaggagtgtaagctccttttctcatttcaaagttgctaccagtgtatgcagtaattagaacaaagaagaaacattcagtagaacattttattgcctagttgacaacattgcttgaatgctggtggttcctatccctttgacactacacaattttctaatatgtgttaatgctatgtgacaaaacgccctgattcctagtgccaaaggttcaacttaatgtatatacctgaaaacccatgcatttgtgctctttttttttttatggtgcttgaagtaaaacagcccatcctctgcaagtccatctatgttgttcttaggcattctatctttgctcaaattgttgaaggatggtgatttgtttcatggtttttgtatttgagtctaatgcacgttctaacatgatagaggcaatgcattattgtgtagccacggttttctggaaaagttgatattttaggaattgtatttcagatcttaaataaaatttgtttctaaatttc

SEQ ID NO: 194 - protein, 288 aa, Homo sapiens
MSSRKQGSQPRGQQSAEEENFKKPTRSNMQRSKMRGASSGKKTAGPQQKNLEPALPGRWGGRSAENPPSGSVRKTRKNKQKTPGNGDGGSTSEAPQPPRKKRARADPTVESEEAFKNRMEVKVKIPEELKPWLVEDWDLVTRQKQLFQLPAKKNVDAILEEYANCKKSQGNVDNKEYAVNEVVAGIKEYFNVMLGTQLLYKFERPQYAEILLAHPDAPMSQVYGAPHLLRLFVRIGAMLAYTPLDEKSLALLLGYLHDFLKYLAKNSASLFTASDYKVASAEYHRKAL

SEQ ID NO: 195 - DNA, 5023 bp, Homo sapiens
ggcggcggcgagccggtgccctgggatcatggtggcgttgcggggccttggtagcggcctgcagccctggtgtccgctggatcttagactcgaatgggttgacacagtgtgggaactggatttcacagagactgagcctttggatcccagcatagaagcagagatcatagagactggattggctgcattcacaaaactctatgaaagccttttaccctttgctactggagaacatggatctatggagagtatctggaccttcttcattgagaacaatgtttcccatagtacactggtggcattgttctatcattttgttcaaatagttcataagaagaatgtcagtgtacagtatcgagaatatggccttcatgccgctgggctttactttttgctactagaagtaccaggcagtgtagccaatcaagtattccacccagtgatgtttgacaaatgcattcagactctaaagaagagctggccccaggaatctaacttgaatcggaaaagaaagaaagaacagcctaagagctctcaggctaaccccgggaggcatagaaaaaggggaaagccacccaggagagaagatattgagatggatgaaattatagaagaacaagaagatgagaatatttgtttttctgcccgggacctttctcaaattcgaaatgccatctttcaccttttaaagaattttttaaggcttctgccaaagttttccttgaaagaaaagccacaatgtgtacagaattgtatagaggtctttgtttcattaactaattttgagccagttcttcatgaatgtcatgttacacaagccagagctcttaaccaagcaaaatacataccagaactggcttattatggattgtatttgctgtgctctcccattcatggagaaggagataaggtcatcagttgtgttttccatcaaatgctcagtgtaatattaatgttagaagttggtgaaggatcccatcgtgccccccttgctgttacctcccaagtcatcaactgtagaaaccaggcggtccagtttatcagcgcccttgtggatgaattaaaggagagtatattcccagtcgtccgtatcttactgcagcacatctgtgccaaggtggtagataaatcagagtatcgtacttttgcagcccagtccctagtccagctgctcagtaaacttccttgtggggaatacgctatgttcattgcctggctttacaaatactcccgaagttccaagatcccacaccgggtttttactcttgatgttgtcttagctctgttagaactgcctgaaagagaggtggataacaccctctccttggagcatcagaagttcttaaagcataagttcctggtgcaggaaattatgtttgatcgttgcttagacaaggcgcctactgtccgcagcaaggcactgtccagctttgcacactgtctggagttgactgttaccagtgcgtcggagagtatcctggagctcctgattaacagtcctacgttttctgtaatagagagtcaccctggtaccttactgagaaattcatcagctttttcctaccaaaggcagacatctaaccgttccgaaccctcaggggagatcaacatagacagcagtggtgaaacagttggatctggagaaagatgtgtcatggcaatgctgagaaggaggatcagggatgagaagaccaacgttaggaagtctgcactgcaggtattagtgagtattttgaaacactgtgatgtctcaggcatgaaggaagacctgtggattctgcaggaccagtgtcgggaccctgcagtgtctgtccggaagcaggccctccagtctcttactgaactccttatggctcagcctagatgcgtgcagatccagaaagcctggttgcggggggtggtcccggtggtgatggactgcgagagcactgtgcaggagaaggccctggagttcctggaccagctgctgctgcagaacatccggcatcacagtcattttcactctggggacgacagccaggtcctcgcctgggcgcttcttactctcctcaccaccgaaagccaggaactgagccgatatttaaataaggcttttcatatctggtccaagaaagaaaaattctcacccacttttataaacaatgtaatatctcacactggcacggaacattcggcacctgcctggatgctgctctccaagattgctggctcctcacccaggctggactacagcagaataatacaatcttgggagaaaatcagcagtcagcagaatcccaattcaaacaccttaggacatattctctgtgtgattgggcatattgcaaagcatcttcctaagagcacccgggacaaagtgactgatgctgtcaagtgtaagctgaatggatttcagtggtctctagaggtgatcagttcagctgttgacgccttgcagaggctttgtagagcatctgcagagacaccagcagaggagcaggaattgctgacgcaggtgtgtggggatgtactctccacctgcgagcaccgcctctccaacatcgttctcaaggagaatggaacagggaatatggacgaagacctgttggtgaagtacatttttaccttaggggatatagcccagctgtgtccagccagggtggagaagcgcatcttccttctgattcagtccgtcctggcttcgtctgctgatgctgaccactcaccatcatctcaaggcagcagtgaggccccagcgtctcagccacccccccaggtcagaggttctgtcatgccctctgtgattagagcacatgccatcattaccttaggtaagctgtgcttacagcacgaggatctggcaaagaagagcatcccagccctggtgcgagagctcgaggtgtgtgaggacgtggctgtccgcaacaacgtcatcattgtaatgtgcgatctctgcattcgctacaccatcatggtggacaagtatattcccaacatctccatgtgtctgaaggattccgacccattcatccggaagcagacactcatcttgcttaccaatctcttgcaggaggaatttgtgaaatggaagggctccctgttcttccgatttgtcagcactctgatcgattcacacccagacattgccagcttcggggagttttgcctggctcacctgttactgaagaggaaccctgtcatgttcttccaacacttcattgaatgtatttttcactttaataactatgagaagcatgagaagtacaacaagttcccccagtcagagagagagaagcggctgttttcattgaagggaaagtcaaacaaagagagacgaatgaaaatctacaaatttcttctagagcacttcacagatgaacagcgattcaacatcacttccaaaatctgccttagtattttggcgtgctttgctgatggcatcctacccctggacctggacgccagtgagttactctcagacacgtttgaggtcctcagctcaaaggagatcaagcttttggcaatgagatctaaaccagacaaagacctccttatggaagaagatgacatggccttggcaaatgtagtcatgcaggaagctcagaagaagctcatctcacaagttcagaagaggaatttcatagaaaatattattccaattatcatctccctgaagactgtgctggagaaaaataagatcccagctttgcgggaactcatgcactatctcagggaggtgatgcaggattaccgagatgagctcaaggacttctttgcagttgacaaacagctggcatcagagcttgagtatgacatgaagaagtaccaggaacagctggtccaggagcaggagctagcaaaacatgcagatgtggccgggacggctggaggtgctgaggtggcacctgtggcacaggttgccctgtgtttagaaacagtgccagttcctgctggccaagaaaaccctgccatgtcacctgccgtgagccagccctgcacacccagggcaagtgctggccatgtagcagtatcatctcctacacctgaaacagggccattgcagaggttgctgcccaaagccaggcccatgtccctgagcaccattgcaatcctgaattctgtcaagaaagccgtggagtcaaagagcaggcatcggagtcggagcttaggagtgctgcctttcactttaaattctggaagcccagaaaaaacgtgcagtcaggtgtcttcatacagtttggagcaagagtcgaatggcgagattgagcacgtgaccaagcgggccatcagcacccccgagaagagcatcagtgatgtcacgtttggagcaggggtcagttacatcgggacaccacggactccgtcgtcagccaaagagaaaattgaaggccggagtcaaggaaatgacatcttatgtttatcactgcctgataaaccgcccccacagcctcagcagtggaatgtgcggtctcccgccaggaataaagacactccagcctgcagcaggaggtccctccgaaagacccctctgaaaacagccaactaaacagcgcctcccaccagtgtccaggcaggcaggagcccttgaggaagcagtctcgtgtcctccgtgtgaaggcagctggatcacttcccgcagtccttgggcagcgctttgctgtggaacacgagagctcctcctcaggggcctggcactcaccttctattctgtatgatgtatttggttaaacactgtcaaataatagagatgtgccagatttagattttcttaccctaatctgtttaatattgtaactttattccatttgaaagtgtcaagcccattcagataagctataatctggtctttaaggaatacaactttaaaactgcagctttcttttatataaatcaagcctctgttaacttgaattccttatagtacatattttcccatctgtaatgccggaattttgattctaatattttttctattatttataagtgcaaatttttttaaaaagtgtacagctttcttaaagtaataaaggtttagcataaatac

SEQ ID NO: 196 - protein, 1507 aa, Homo sapiens
AAASRCPGIMVALRGLGSGLQPWCPLDLRLEWVDTVWELDFTETEPLDPSIEAEIIETGLAAFTKLYESLLPFATGEHGSMESIWTFFIENNVSHSTLVALFYHFVQIVHKKNVSVQYREYGLHAAGLYFLLLEVPGSVANQVFHPVMFDKCIQTLKKSWPQESNLNRKRKKEQPKSSQANPGRHRKRGKPPRREDIEMDEIIEEQEDENICFSARDLSQIRNAIFHLLKNFLRLLPKFSLKEKPQCVQNCIEVFVSLTNFEPVLHECHVTQARALNQAKYIPELAYYGLYLLCSPIHGEGDKVISCVFHQMLSVILMLEVGEGSHRAPLAVTSQVINCRNQAVQFISALVDELKESIFPVVRILLQHICAKVVDKSEYRTFAAQSLVQLLSKLPCGEYAMFIAWLYKYSRSSKIPHRVFTLDVVLALLELPEREVDNTLSLEHQKFLKHKFLVQEIMFDRCLDKAPTVRSKALSSFAHCLELTVTSASESILELLINSPTFSVIESHPGTLLRNSSAFSYQRQTSNRSEPSGEINIDSSGETVGSGERCVMAMLRRRIRDEKTNVRKSALQVLVSILKHCDVSGMKEDLWILQDQCRDPAVSVRKQALQSLTELLMAQPRCVQIQKAWLRGVVPVVMDCESTVQEKALEFLDQLLLQNIRHHSHFHSGDDSQVLAWALLTLLTTESQELSRYLNKAFHIWSKKEKFSPTFINNVISHTGTEHSAPAWMLLSKIAGSSPRLDYSRIIQSWEKISSQQNPNSNTLGHILCVIGHIAKHLPKSTRDKVTDAVKCKLNGFQWSLEVISSAVDALQRLCRASAETPAEEQELLTQVCGDVLSTCEHRLSNIVLKENGTGNMDEDLLVKYIFTLGDIAQLCPARVEKRIFLLIQSVLASSADADHSPSSQGSSEAPASQPPPQVRGSVMPSVIRAHAIITLGKLCLQHEDLAKKSIPALVRELEVCEDVAVRNNVIIVMCDLCIRYTIMVDKYIPNISMCLKDSDPFIRKQTLILLTNLLQEEFVKWKGSLFFRFVSTLIDSHPDIASFGEFCLAHLLLKRNPVMFFQHFIECIFHFNNYEKHEKYNKFPQSEREKRLFSLKGKSNKERRMKIYKFLLEHFTDEQRFNITSKICLSILACFADGILPLDLDASELLSDTFEVLSSKEIKLLAMRSKPDKDLLMEEDDMALANVVMQEAQKKLISQVQKRNFIENIIPIIISLKTVLEKNKIPALRELMHYLREVMQDYRDELKDFFAVDKQLASELEYDMKKYQEQLVQEQELAKHADVAGTAGGAEVAPVAQVALCLETVPVPAGQENPAMSPAVSQPCTPRASAGHVAVSSPTPETGPLQRLLPKARPMSLSTIAILNSVKKAVESKSRHRSRSLGVLPFTLNSGSPEKTCSQVSSYSLEQESNGEIEHVTKRAISTPEKSISDVTFGAGVSYIGTPRTPSSAKEKIEGRSQGNDILCLSLPDKPPPQPQQWNVRSPARNKDTPACSRRSLRKTPLKTAN

SEQ ID NO: 197 - DNA, 1653 bp, Homo sapiens
cggttgcttgctgtcccagcggcgccccctcatcaccgtcgccatgcccggaggtctgcttctcggggacgtggctcccaactttgaggccaataccaccgtcggccgcatccgtttccacgactttctgggagactcatggggcattctcttctcccaccctcgggactttaccccagtgtgcaccacagagcttggcagagctgcaaagctggcaccagaatttgccaagaggaatgttaagttgattgccctttcaatagacagtgttgaggaccatcttgcctggagcaaggatatcaatgcttacaattgtgaagagcccacagaaaagttaccttttcccatcatcgatgataggaatcgggagcttgccatcctgttgggcatgctggatccagcagagaaggatgaaaagggcatgcctgtgacagctcgtgtggtgtttgtttttggtcctgataagaagctgaagctgtctatcctctacccagctaccactggcaggaactttgatgagattctcagggtagtcatctctctccagctgacagcagaaaaaagggttgccaccccagttgattggaaggatggggatagtgtgatggtccttccaaccatccctgaagaagaagccaaaaaacttttcccgaaaggagtcttcaccaaagagctcccatctggcaagaaatacctccgctacacaccccagccttaagtctcttggagaagttggtgctgtgagccagaggatgtcagctgccaattgtgttttcctgcagcaattccataaacacatcctggtgtcatcacagccaaggtttttaggttgctataccaatggcttattaaatgaaaatggcactaaaagtttcttgagattctttatactctctgccttcagcaatcaattccattcatacatcagcactctgctggttctgtttgaaatatgttctgtatttaaaactcaaatcttgttggatctctgcagggcttgtgaccaatgaagtcatatttgttgatggttgacaaagcttgcttcactccatcagagaatgactatcaatttttttttaactgtcctatcacgtcctctcctgtcacccattttgaagagtggcagaacttgaagttcaacttcctctgtaaatatccaagtataaagcccaggaacttctagaataacccagatgcgctttaattttttttaatatgttttgatcacagaacttctagaataacccagatgctctttcatattcttttaatacatcttgatcacagctgggggaaaaaaagctttttaattctgtaccttcctagtagataagtgaagagcagggaaagagacctttaaatattttgctataaaaaaatttgtgataagtttctatcaaaatggggagattgcagaaaaggcttcccttggctcccaaggaggtgtagcaggtgtgagcaatattagtgccatgtgcctttcacacagggtttgcatttatcagtctgttttccgatgatgtgtacatgaaagagtacaccatgtgaagagaagagagaatgattgaaaatgttttagtatagaactcttcttgcagtgggttgctattttctagattttactttttagggaacaaaataaaatcctttgtt

SEQ ID NO: 198 - protein, 224 aa, Homo sapiens
MPGGLLLGDVAPNFEANTTVGRIRFHDFLGDSWGILFSHPRDFTPVCTTELGRAAKLAPEFAKRNVKLIALSIDSVEDHLAWSKDINAYNCEEPTEKLPFPIIDDRNRELAILLGMLDPAEKDEKGMPVTARVVFVFGPDKKLKLSILYPATTGRNFDEILRVVISLQLTAEKRVATPVDWKDGDSVMVLPTIPEEEAKKLFPKGVFTKELPSGKKYLRYTPQP

SEQ ID NO: 199 - DNA, 5347 bp, Homo sapiens
cgaatatatcagatttaaccatatgaaattgccattttgtaggtgataataaacagttgactatcatcaatttcataggcctgatgtcaatttcatatttcattctttaaagaccgccactcattgttggaaataaaaggacaaaggtaggctggcatagcctctccaagagagcagatcgctgcacttacaaagggttttggggatgtgtggagttcaaggactggtgaggttttggaggcatacatgggttgatggcatctgtataggtggttacttgaaaagcctgttattcatcagttgcccctcaagtctgcagtgagtcggctaactctcagaagccaggggttgtcatggactggctgccttacaaaagctgtgcactgaggggtgtttacatgatggaataggttcaaagctggttctagtggccacttgttaccatggctgcagatgatccgagaactttcattctcatggttcaacctaagaaaggtctataagagtataccccactcttgaaagcaggtggtggagacgttgactactcaccaccatttcctgaaatcaatttgaagagaaagatacctttgtggacactgttctcaagttctgaaagtgggtagcattacattggcagtttaaacacttgcttttttttttttgagtcttgctctgtcacccagtttggagtgcagtggtgcagtctcggctcactgcgacctcggcctcctggattcaagttcagcctcccgggtggctgggattgtaggagtgtgccaccacgcatggctaatctttttgtgtttttggtggagatggagtttcacactgtttgcggactggtaccaagttcctgacttcaaatgctctgcctgcctcggcctccctaggtgttgggattacaggcgtgagccaccgtgctcagcctaaatacttgctttgattttgcagatctggtgctccaaattgattaagacacaagaccgttctctccaaatcagagagctactcatctctcccttccatgtgtttcttgtactgctccctctatctcttatcatgagactcctctcttcctgcagtgtggtaaaactacagcaatcgtcttaacctgtgagatctgtcacctttgcattttccactcatgcagctggttctataaaccaactcttctgcttggggggatctaatcatgaccttttacccttttgtggcctcttctagtacaaggcgagtggataattccaacacaagactggcagtccaaattgaaagagatccagggaatgatgacaacaatctcaattccattttttatgaacacttgacaaggaccctccaggagtccctctgtggagacttagttcttggacgttggggcaactacagctctggcgattgctttattttggcttcagatgacctcaatgcctttgttcacctgattgaaattggaaatggtcttgtcacctttcaacttcgaggactggaattccgaggaacctactgccagcagagggaggtagaagccatcatggagggcgacgaggaggacagaggctgctgctgctgcaaaccaggccacttgcctcacctgctgtcctgcaacgctgcctttcacctccgctggctcacctgggaaatcacgcagacccagtacatcctggagggctacagcatcctggacaacaacgcggccaccatgctgcaggtgtttgacctccgaaggatcctcatccgctactacatcaagagtataatatactatatggtaacgtctcccaaactcctctcctggatcaaaaatgaatcacttctgaagtccctgcagccctttgccaagtggcattacattgagcgtgaccttgcaatgttcaacattaacattgatgatgactacgtcccgtgtctccaggggatcacacgagctagcttctgcaatgtttatctagaatggattcaacactgtgcacggaaaagacaagagccttcaacgaccctggacagtgacgaggactctcccttggtgactctgtccttcgccctgtgcaccctggggaggagagctctgggaacagccgctcacaatatggccatcagcctggattctttcctgtatggcctccatgtcctcttcaaaggtgacttcagaataacagcacgtgacgagtgggtatttgctgacatggacctactgcataaagttgtagctccagctatcaggatgtccctgaaacttcaccaggaccagttcacttgccctgacgagtatgaagacccagcagtcctctacgaggccatccagtccttcgagaagaaggtggtcatctgccacgagggcgacccggcctggcggggcgcagtgctgtccaacaaggaagagctgctcaccctgcggcacgtggtggacgagggtgccgacgagtacaaggtcatcatgctccacagaagcttcctgagcttcaaggtgatcaaggttaacaaagaatgcgtccgaggactttgggccgggcagcagcaggagcttatatttcttcgcaaccgcaatccggagcgcggcagtatccagaacaataagcaggtcctgcggaacttgattaactcctcctgcgatcagcccctggggtaccccatgtatgtctccccactaaccacatcctacctagggacacacaggcagctgaagaacatctggggtggacccatcactttggacagaattaggacctggttctggaccaagtgggtaaggatgcggaaggattgcaatgcccgccagcacagtggcggcaacattgaagacgtggacggaggaggggccccgacgacaggtggcaacaatgccccgaatggtggcagccaggagagcagcgcagaacagcccagaaaaggcggtgctcagcacggggtgtcatcctgtgaagggacacagagaacaggcaggaggaaaggcaggagccagtccgtgcaggcacactcagcgctaagccaaaggccgcccatgctgagctcatctggccccatcttagagagccgccaaacattcctccagacgtccacctcagtgcacgagctggcccagaggctctcgggcagccggctctccttgcacgcctcggccacgtccctgcactctcagcccccgcccgtcaccaccaccggccacctgagtgtccgtgagcgggccgaggcgctcatcaggtccagcctgggctcctccaccagctccaccctgagcttcctcttcggcaagaggagcttttccagcgcgctcgtcatttccggactctctgctgcggaggggggcaataccagtgacacccagtcatccagcagcgtcaacatcgtgatgggcccctcagccagggctgccagccaggccactcgggtaaggggctgggcagggctcaccaggacaggctgggatggtggcacgggctcctggcctgagcgtggcacctgccttgcgttcccacccttctgcctgcagaaccccatccccttctctatggggctcccagagtgacaaaggacagtgattagacacgaagtggcttagctgctcttgaaagcagacaagatacagagcagatatcctgtaaacgataatgcccaggcaggcactgaaaggagtcaccggatacagaggttctgcagaactgtggccatctgccctacaccggggcatgacggagaatgccctccacccattcacacagcaggactcttctcacatgattctggcctgagggagaggaaaggacacctgtcaatgctggagttagagcttcactgcttctcagccaatcgatttgactttaaagctgctgagatggcccactgcttttaggtatttaaatactagacaaggagagttctaaggacttcacccaaataagctgttacttgtccagaatcccaaaccagctgagatgaaatgaatacttgagcttcttcagtgagaaaaaagtaaataaatacccagcagtgctcctatgtgacctggtagacagggaaaatcgatggtgtcaaggcaaaaatgggtcaggtttggagagttcccccactccttttgagtgttcaggttttccttaccatggctcatgctttccatcaagcaccagagttgcagtggcttggcctctggttctgggtgaggttatttgcaggtggagacggggggctgcacctgaacatttctagtgtcaccctccctctccttcatgggaaacagctctccagggaagtaccttcctgccaggggaagccaaggctgggccggccgccctacaaggagccacaggattgcagccatgggtgccacctttcatggaaggggagatttatgggctttcctggaacccccaggctgtcctggccaagaggaaagaggtggttacttcaggagtttgaccttagttagataactaaaagaatacatttcccctcccttttctttatttcctcaataaaaatgtacaaagtatcacccttctccatgccccaatctgtgttaaagtcacaatctatgggtgtagttctgggattctgtcaaattctccttcctgctctccaaaatggacaattgtcgtagggaccacatgcccccagaatacaatggcctctgtgttctactggggtcaagcctgctagaactcagcattcatgacaggggctaagtgtgcatgaagtgacactgactacagctagaaagccaggcgcacaaatgccccttccccccagggccgctctttccagcgcagtcatccagaaaggcccacgtgcagagcccctgtgtctcagatgctgcttcagttgcccgtcctgtcctcagaggccactgtgctggccctctatcatttgacctgactttagaacctgacctcaaggatatggcagcgctagcctttagctcccacagcacggatgggggtgatgccagttagaagtgggtagtgaacgtttgctgagctgttcactgtttctctcttctctttggaagcacctctccgagccatgtgagccccctgatgccaccgagcaggggcagcttcatgaccgatgtctggctgaggctgtggcggacactctcggggttgtctgcaggagagcaagccaggaggacatgggcctggacgacacggcctcgcagcaaagtgtgtcagacgagcagtgacgggcgtgcggccgggcggggaggctggctcccccacacctcccacctgcattgctctccctcgtgctccccaaatcaccacaaccaaccaataccgcgatccatgagggactcctcctgtggaaaaggagagctgttccagaacacagaactgatctcaggtttttg

SEQ ID NO: 200 - protein, 777 aa, Homo sapiens
MTFYPFVASSSTRRVDNSNTRLAVQIERDPGNDDNNLNSIFYEHLTRTLQESLCGDLVLGRWGNYSSGDCFILASDDLNAFVHLIEIGNGLVTFQLRGLEFRGTYCQQREVEAIMEGDEEDRGCCCCKPGHLPHLLSCNAAFHLRWLTWEITQTQYILEGYSILDNNAATMLQVFDLRRILIRYYIKSIIYYMVTSPKLLSWIKNESLLKSLQPFAKWHYIERDLAMFNINIDDDYVPCLQGITRASFCNVYLEWIQHCARKRQEPSTTLDSDEDSPLVTLSFALCTLGRRALGTAAHNMAISLDSFLYGLHVLFKGDFRITARDEWVFADMDLLHKVVAPAIRMSLKLHQDQFTCPDEYEDPAVLYEAIQSFEKKVVICHEGDPAWRGAVLSNKEELLTLRHVVDEGADEYKVIMLHRSFLSFKVIKVNKECVRGLWAGQQQELIFLRNRNPERGSIQNNKQVLRNLINSSCDQPLGYPMYVSPLTTSYLGTHRQLKNIWGGPITLDRIRTWFWTKWVRMRKDCNARQHSGGNIEDVDGGGAPTTGGNNAPNGGSQESSAEQPRKGGAQHGVSSCEGTQRTGRRKGRSQSVQAHSALSQRPPMLSSSGPILESRQTFLQTSTSVHELAQRLSGSRLSLHASATSLHSQPPPVTTTGHLSVRERAEALIRSSLGSSTSSTLSFLFGKRSFSSALVISGLSAAEGGNTSDTQSSSSVNIVMGPSARAASQATRVRGWAGLTRTGWDGGTGSWPERGTCLAFPPFCLQNPIPFSMGLPE

SEQ ID NO: 201 - DNA, 3311 bp, Homo sapiens
cgcgctgggagaagacttcgccgctcggggccgcagcctgttgggcaaggcgagcatcatggcctcggattgcgagccagctctgaaccaggcagagggccgaaaccccaccctggagcgctacctgggagccctccgtgaggccaagaatgacagcgagcagtttgcagccctgctgctagtgaccaaggcagtcaaagcaggtgacatagatgccaaaactcggcggcggatcttcgatgctgtcggcttcaccttccccaatcgtctcctgaccaccaaggaggcgccggatggctgccctgaccatgttctgcgggctttgggtgtggccctgctggcctgcttctgcagtgaccctgaactggccgcccatccccaagtcctgaacaagattcccattcttagcaccttcctcacagcccggggggacccggacgatgctgcccgccgctccatgattgatgacacctaccagtgcctgacggctgtagcaggcacacccagagggcctcggcacctcattgctggtggcaccgtgtctgccctatgccaggcatacctggggcacggctatggctttgaccaggccctggcactcctggtggggctgctggctgctgccgagacacagtgctggaaggaggcggagcccgacctgctggccgtgttgcggggcctcagtgaggatttccagaaagctgaggatgccagcaagtttgagctctgccagctgctgcccctctttttgcccccgacaaccgtgccccctgaatgctaccgggatctgcaggccgggctggcacgcatcctgggaagcaagctgagctcctggcagcgcaaccctgcactgaagctggcagcccgcctggcacacgcctgcggctccgactggatcccggcgggcagctccgggagcaagttcctggccctgctggtgaatctggcgtgcgtggaagtgcggctggcactggaggagacgggcacggaggtgaaagaggatgtggtgaccgcctgctatgccctcatggagttggggatccaggaatgcactcgctgtgagcagtcactgcttaaggagccacagaaggtgcagctcgtgagcgtcatgaaggaggccataggggctgttatccactacctgctgcaggtggggtcagagaagcagaaggagccctttgtgtttgcctcggtgcggatcctgggtgcctggctggccgaggagacctcatccttgcgtaaggaggtgtgccagctgctgcccttcctcgtccgctatgccaagaccctctacgaggaggccgaggaggccaatgacctttcccagcaggtggccaacctggccatctcccccaccaccccagggcccacctggccaggagacgctctccggctcctcctgcctggctggtgccacctgaccgttgaagatgggccccgggagatcctgatcaaggaaggggccccctcgcttctgtgcaagtatttcctgcagcagtgggaactcacatcccctggccacgacacctcggtgctgcctgacagcgtggagattggcctgcagacctgctgccacatcttcctcaacctcgtggtcaccgcaccggggctgatcaagcgtgacgcctgcttcacatctctaatgaacaccctcatgacgtcgctaccagcactagtgcagcaacagggaaggctgcttctggctgctaatgtggccaccctggggctcctcatggcccggctccttagcacctctccagctcttcagggaacaccagcatcccgagggttcttcgcagctgccatcctcttcctatcacagtcccacgtggcgcgggccaccccgggctcagaccaggcagtgctagccctgtcccctgagtatgagggcatctgggccgacctgcaggagctctggttcctgggcatgcaggccttcaccggctgtgtgcctctgctgccctggctggcccccgctgccctgcgctcccgctggccgcaggagctgctccagctgctaggcagtgtcagccccaactctgtcaagcccgagatggtggccgcctatcagggtgtcctggtggagctggcgcgggccaaccggctgtgccgggaggccatgaggctgcaggcgggcgaggagacggccagccactaccgcatggctgccttggagcagtgcctgtcagagccctgaggggtgtccaccggggacagacccaggggcgggcagagagggaaggagggaggaggcatcttccctgaagcccccaatctggcccccccctccccagacttcctccccaaaacaccccagctttctggcttttctgagggcaagggcatggtgcccacccctcaagtgtaaggaactgcgttccgccctcaggcccccatgggggcagggatcggcttggaaatcaacgtggttgtccccgccaggccggggaaggttggagcagcccccagggaggggggcactaggtgtcattgtgcccgatgtctggctcccctgcaggagggaggctccagggtaagacagggctggcaggagcagactgcctcagcccatgtgccctgccggccagggcgtgggctcccctcggctgtggtgcctcctctggccccccaggtccacgtcctttaaattggccctttggctcttgcccttggctcccttgggcagacagcaggcttaggccattgatatcgcagttcttcctatcagcttcagtgacccagggtctgaactgcctccatcctagggcaacctggggcagacaggcctggtggggggtggggaaacctccttccacctgagcttgcttgaagggacccagagtctttgggcccagatctttaaacctttgtgtcgtgttgcagcagagtgacgatgggggttggggggttatttattttgcctgtccttatccctgcttggacacctgagcatctgattcctgtccccctggtgccatctggcctggctggagccaggaacaggagggacacttccccagaatccgcatgtttccccagtgattacactccactgccaccgtggtgcctggctttaactcccacccctgctatgactcctctctgcagagacgcgactggcggctccagcagggactacctttcttataaacccagggggaccacacacacacacacacacacacacacacacacacacacacacacacacacacacactcttgatcccttgcttccctcccccagtgcgttctgtgatcgccaagttcaaagctgtgcacatgtggacactcaataaatgttcattggtg

SEQ ID NO: 202 - protein, 731 aa, Homo sapiens
ALGEDFAARGRSLLGKASIMASDCEPALNQAEGRNPTLERYLGALREAKNDSEQFAALLLVTKAVKAGDIDAKTRRRIFDAVGFTFPNRLLTTKEAPDGCPDHVLRALGVALLACFCSDPELAAHPQVLNKIPILSTFLTARGDPDDAARRSMIDDTYQCLTAVAGTPRGPRHLIAGGTVSALCQAYLGHGYGFDQALALLVGLLAAAETQCWKEAEPDLLAVLRGLSEDFQKAEDASKFELCQLLPLFLPPTTVPPECYRDLQAGLARILGSKLSSWQRNPALKLAARLAHACGSDWIPAGSSGSKFLALLVNLACVEVRLALEETGTEVKEDVVTACYALMELGIQECTRCEQSLLKEPQKVQLVSVMKEAIGAVIHYLLQVGSEKQKEPFVFASVRILGAWLAEETSSLRKEVCQLLPFLVRYAKTLYEEAEEANDLSQQVANLAISPTTPGPTWPGDALRLLLPGWCHLTVEDGPREILIKEGAPSLLCKYFLQQWELTSPGHDTSVLPDSVEIGLQTCCHIFLNLVVTAPGLIKRDACFTSLMNTLMTSLPALVQQQGRLLLAANVATLGLLMARLLSTSPALQGTPASRGFFAAAILFLSQSHVARATPGSDQAVLALSPEYEGIWADLQELWFLGMQAFTGCVPLLPWLAPAALRSRWPQELLQLLGSVSPNSVKPEMVAAYQGVLVELARANRLCREAMRLQAGEETASHYRMAALEQCLSEP

SEQ ID NO: 203 - DNA, 4118 bp, Homo sapiens
aattgagattcggagttaaaacagggatgtgcagatggaggtcggaggagacactgctgccccggcccccgggggcgcggaggacttggaggacacgcagttccccagtgaggaagctagagaaggtggaggggttcacgcggtcccgccggatcccgaagacgagggcctggaggaaacaggatccaaggacaaggaccagccacccagcccatcaccaccgccccagtcagaggccctgtcaagcacctctcggctctggagtcctgcagcccctgagaatagtcccacatgtagccctgagagtagctctggaggccagggcggggaccccagtgatgaggagtggcgcagccagcggaagcatgtgtttgtgctgagtgaggctggcaagcccatctactcgcggtatggtagtgtggaggcgctgtcggctaccatgggtgtaatgaccgccctggtgtcctttgtgcagagtgcgggagatgccatccgtgccatctacgctgaggaccacaagctggtgttcctacaacagggcccactgttgctcgtggccatgtcacggacttctcagtcagcagcccagctgcggggggagctgctagctgtgcacgcacagatcgtgagcacacttacacgtgcaagtgtcgcccgcatcttcgcacacaagcagaactatgacctccgccgcctgctggctggttcagagcgcacactggaccgacttctggacagtatggagcaggacccaggagccctgctcctgggtgccgtgcgctgtgtgccccttgcccgcccgctgcgagacgcactaggtgcgctcctccgacgttgcacagcgcctggcctggcgctgtcagtgctggcagtaggcggtcgacttataacagcagcccaggagcggaatgtgctggccgagtgccggctggacccagctgacctgcagttgctgctcgactgggtgggtgcaccagcctttgcggcgggtgaggcttgggcacctgtgtgcctgccccgcttcaaccctgatggttttttctacgcctacgtggcccgcctggatgctatgcctgtctgcctgctgctgcttggcacccaacgtgaagccttccatgccatggccgcctgccggcgcctggtcgaagatgggatgcatgcccttggtgccatgcgtgcccttggggaggctgccagcttctctaatgcctcatcagccagtgctcctgcctacagcgtgcaggctgtcggggcgccgggcctccggcacttcctgtataagccgctggacatccctgaccaccaccgccaactgccccagtttaccagccctgagctagaggccccctacagcagagaggaggagcggcagcggctgtcggacctgtaccaccgcctgcatgctcgtctccacagcacctcccgacccctgcgcctcatttaccacgtggctgagaaggagacactactggcctgggtgacctccaaattcgagctctatacctgcctcagccctctggtgaccaaggcaggtgcaatcttggtagtgaccaaactcctgcgctgggtgaagaaagaggaggaccggctcttcattcgttacccacccaagtactccacaccaccagccacctctacggaccaagctgcccataatggcttgttcactggactctgatagttggagctcccagaccaggcagtgctgggagcaaccacctttgttttttaccttctgtctaccctggaaatgtgtgtgggggtgtgtctgtggccagtcattgtctccctaagcaatggggcaaggtctgagggcccaccgatgagagagatggtggcagccgccaggcgagcaggctgctttccctgcccagtcatgcacctccccctctggggaaatccttaggcctccctctcccttccctctgtctcatctcctccacttggatgatgctctagcctctgtcagggactgtcccctccaaacttgcttccgtggtctgcctcctagttgaatctcagccctgagtgtccagatctggccaaggtgtctagggtggcccacgggggtgctggaattggcacttcagggccaggctatgcttgggactggcctgagggtattttaaagaaaaaaactacataaaaggcctaaaagtaagacccacaaggatattcctttgcccttcttgtacttttttcatctttaccctgccagaaatgacccgccctcaatgctggctgctgctaacattaatgagaaggtggccttcagtgtccacctgtggaacccaggacacagcacctgactgcacacagtggctgaaatccagcatttttacataggagatgcacttagcctctaagcctcgttttactcatctgtgaaacagagataagtaaccctctctcatgaactctttgatgaggatttgtaaacgaaaacagactcgaactattgtgtaccaccacatagcacatgcacgtctgtcccagactttgacaacctgcacaagacaagcagcctaaagcaggagagacctccctagggttttgtgtgtgtgcacactaccctcactccccaactggccattaccctagttctgcccttgtttgtggagttacagcctcaaggttgtagcatgtgtgctggcaatcagggccgcagtgtgttctgcgcctgcccagagctgactcctgatttaaccgctggcgtaaccgcgggttgcacgcatgcgtgctgaaaagcctttcaccctcacgtggtttcttttttaaccagtcatcaagcgaggctcgcgcgcaggccctgcgttggaaaatggcggggaagctgaaacctctgaatgtggaggcgccagaagctgctgaggaggctgaaggtagtgagggcaagtgggctgcactcctttctctccaaccagggcagaaaggagggaggattcgtcccattacaataatgaaataatgatattctaatttttttaaataaaatgttaagccttttgttattgaagaaaaacaattttttaaccgttcagcacagtggagataaattaacaggcatattcttatcaccgagattaacttttgtcaactgtagtgtatacgttgttgaaagtaaacaacatgtagttcagtacgaaagtcttcaaacaaaagtggggcggtggggatgttctcataacaatcaccgtgctgcagccaccccttattaacagtaattcccagtgtcgccatttcacacctaacacatatgacactttgatggactcttaaacctcctaatcgaacatggcctcccccacagcctcttttctccagggtattgacttgaatgacaggcaaaggagggtggaggggtgtcggcctagacacttggaaattgtattccatccaaaagaaaaaaaaatctcaggccgggcacggaggctcacgcctgtaatcccagcactttgggaggccgaggcgggcagatcacgaggttaggagttcgaggccagcctgaccaacatggtgaaacaccatctctactaaaaaactatatatacatatacatatgtgtgtatgtgtatttatatgtatgtatgtatgtgtgtgtgtatatatatatatatatgtatatgtgtatatatatatatatgtgtatatatatatatatatacacacactaatcagccgggcacggtggtgtgggcctgtaatcgcagctactcaggaagctgaggcaggagaatcacttgaacccgagaggcggaggttgcagtgagccgagatcatgtcactgcactccagcctgggtgacagagtgagactccgtctcaaaagaaaaaaaattctcccttggccgggcttggtggcttatgcctgtaatcccagcactttggaaggccgaggcgggtgggtcacctgaggtcaggagtttgagaccagcctggccagcatggcgaaacctcgtctctactaaaaatacaaaaattgtccgggtgtggtggcgggcgcctgtagtcccagctactggggaggctgaggcaggggaattgcttgaacccgggaggcagaggttatcgtgagctgacattgcgccactgcactccagcgcggaagacagagtgagc

SEQ ID NO: 204 - protein, 547 aa, Homo sapiens
MEVGGDTAAPAPGGAEDLEDTQFPSEEAREGGGVHAVPPDPEDEGLEETGSKDKDQPPSPSPPPQSEALSSTSRLWSPAAPENSPTCSPESSSGGQGGDPSDEEWRSQRKHVFVLSEAGKPIYSRYGSVEALSATMGVMTALVSFVQSAGDAIRAIYAEDHKLVFLQQGPLLLVAMSRTSQSAAQLRGELLAVHAQIVSTLTRASVARIFAHKQNYDLRRLLAGSERTLDRLLDSMEQDPGALLLGAVRCVPLARPLRDALGALLRRCTAPGLALSVLAVGGRLITAAQERNVLAECRLDPADLQLLLDWVGAPAFAAGEAWAPVCLPRFNPDGFFYAYVARLDAMPVCLLLLGTQREAFHAMAACRRLVEDGMHALGAMRALGEAASFSNASSASAPAYSVQAVGAPGLRHFLYKPLDIPDHHRQLPQFTSPELEAPYSREEERQRLSDLYHRLHARLHSTSRPLRLIYHVAEKETLLAWVTSKFELYTCLSPLVTKAGAILVVTKLLRWVKKEEDRLFIRYPPKYSTPPATSTDQAAHNGLFTGL

SEQ ID NO: 205 - DNA, 6250 bp, Homo sapiens
gttgcagtgagccgagatcgcgccactgcactccagcctgggcgacggagcgagactttgtctcaagattactctaaacagaaacaagagtgaaataaatttgtggagttaataataaaaatgttattctctgtggtatgttttcttttcttttgtttttttgggacggggtcttgctctgttgcccaggctggagtgcagtggcgccatcttggctcactgcggcctctgcctcccgggttcgagcgattctcctgcctcgggcccctgagtggctgggattacaggcacgtgccaccacgcctagctaatttttatatttttagtagagacggggtttcgccatgttggtcatgttggtctcgaactcctgacctcatgatctgccccctgccggcctcccacagtgctgggattgcaggcgtgagccaccgcgcccggcctgtattttttcatttcatagaatttccagataaaagtcagagtcaactagttttataatactgaaaagttttgcaaatacaagcatgtcacttaatgatggggatgtgttctgagaaatgtgtcattaggtgattccgtcattgtgcaaatgtcatagagtatacttacataaacctaggtggtatgtagcctatatgatatatgtggcttatatgatataccctattgctcctaggctgcaaacctgtatagcatgttactatcctgaagtcaatgggcaattgtaacacaatggcaagtatttgtgtattgaaacataagggtatagtaaaaatatggtactattaatacaactgtatgggactaccattgtatatgcggtccatcattggccaaactttctttatggtggcacaagactacataataaatggtaaagtaaccagacttggagatggggaggagggagaagaatgccaaatgtatgtttcctcccacagactagcaggcatctagtatcaggcaacatacttatacaatcatttcctactcctgtctcacacttgccagaatctggatttaattttttttttttattgttagaccagtaatgcagttttcatattttgtataacaaaaaagttgtaggacttttccttcttactgtgaaaatatgactcattaaatacataacttttagtattggccatttgtattcttatactcttagtcacaaagataactacgttttacaaagtcgaaaggttaataatagcagctagcatgaattcagagcttgctatgtattgagcactgggtttaaacacatatgctctattttattaagtccttatagtaggaaagtgaagaatacactagtcactgaagttccttcagtgctcaagactcaagtgcactatagcaagacaaacaccaggaaacatgtaactctgcttcgaatactttagcaagtgaatggcccagtttgggaaagcaagacaaacactggatccataatggctttttacacctgattggaatgcagaaaaaatggaaccactaactactaatattatctttgccagcaggtgagcagtacatacctgacttcagaggattttattgaaaccaatagatgatggttaataaaaacaaatatcctcagctttccttcttttacttgtcatctgacaaccactatttagctaaaactaaaatggattagagatacaagatgatgaataacaattattaacttttgtgagcatataatgtgagtcagctactacactaagaactttacatagattcccttaattttctcaataatcctatgagaactgtccttgtatgagcaaccccattttatagctgaagatacttgaggcttcaagaggttatataaacatgttcatggtcaacagttattaagcagtgagtgacattctcacgagattaatgagatcatctgtgtgagatacaaatacatctattgtgtatgtttgtgtttttaatggagaccaatggtatgacagaatgaagtccttttatcagtcagtcaagatctgatgtggctattcaaatataggcaaaactgatgttttccttttttagttaagttaaatgtactatttaaataactgtgaatatttagaatattcacagaattgtgcaaccatcaccacaatctttagaatattttcatcatctcaaaaagatactttgtagcctttagcacccttcccactgtacccccccccatacccctggccataggcaactactaaattactttctgtccctgcaggttgtcctattctggatactttgtatatgtggaatcataaaataggtgatcttttatgactggcatctttcaagcatgtttttgatattttcatccatgttgtaggatattaaattaactttttgcataggaataactagctagaaaagcatgggctgaatatgtctgcagaatgtagcatttagaaaagaaagacttccaggagacaaatgaggtagtaactaaaatgtaaataactaaaaattagctttgagtctttaataaactacctttcatgttttgctttcactaggaatgaacttttaattttttggagctataaatacatgtagtttctaaagacatctttgtttttaaagaaaagacatctgcaggctttttcttagtgttcctattaagtatgtatgagtgtgtgcatttgtgtgtgtgtgtgtgcatgtttagtgactttacatgtgtatacatacaaatgtacacagtcatatatgactagtggtacatggaatctcaatttaattgtaaaagtgaaggagttctaaaactagttttagtatagtaagtgggatatagtaagaatgtcctacaatttaaaagcttatttggttatcttcaatggattttgaatgtattcaatactagatttgcgagtgactatgcctttttagtaaacaaaagaaaggctataatgtagaaagtatatggaataagcataacatctgtcctaatctaattttcaggcacatctccagacttcaatttggctgaaataattcatgccacggacctgtgcacatgcctggaattgagagacacagttaaaagactccaagttgctttctgccttttgaaaactcctgaaaaccatccctctggactctggaattctacacagctcaaccaagactttgcttgaatgtttacattttctgctcgctgtcctacatatcacaatatagtgttcacgttttgttaaaactttggggtgtcaggagttgagcttgctcagcaagccagcatggctaggatgagctttgttatagcagcttgccaattggtgctgggcctactaatgacttcattaaccgagtcttccatacagaatagtgagtgtccacaactttgcgtatgtgaaattcgtccctggtttaccccacagtcaacttacagagaagccaccactgttgattgcaatgacctccgcttaacaaggattcccagtaacctctctagtgacacacaagtgcttctcttacagagcaataacatcgcgaagactgtggatgagctgcagcagcttttcaacttgactgaactagatttctcccaaaacaactttactaacattaaggaggtcgggctggcaaacctaacccagctcacaacgctgcatttggaggaaaatcagattaccgagatgactgattactgtctacaagacctcagcaaccttcaagaactctacatcaaccacaaccaaattagcactatttctgctcatgcttttgcaggcttaaaaaatctattaaggctccacctgaactccaacaaattgaaagttattgatagtcgctggtttgattctacacccaacctggaaattctcatgatcggagaaaaccctgtgattggaattctggatatgaacttcaaacccctcgcaaatttgagaagcttagttttggcaggaatgtatctcactgatattcctggaaatgctttggtgggtctggatagccttgagagcctgtctttttatgataacaaactggttaaagtccctcaacttgccctgcaaaaagttccaaatttgaaattcttagacctcaacaaaaaccccattcacaaaatccaagaaggggacttcaaaaatatgcttcggttaaaagaactgggaatcaacaatatgggcgagctcgtttctgtcgaccgctatgccctggataacttgcctgaactcacaaagctggaagccaccaataaccctaaactctcttacatccaccgcttggctttccgaagtgtccctgctctggaaagcttgatgctgaacaacaatgccttgaatgccatttaccaaaagacagtcgaatccctccccaatctgcgtgagatcagtatccatagcaatcccctcaggtgtgactgtgtgatccactggattaactccaacaaaaccaacatccgcttcatggagcccctgtccatgttctgtgccatgccgcccgaatataaagggcaccaggtgaaggaagttttaatccaggattcgagtgaacagtgcctcccaatgatatctcacgacagcttcccaaatcgtttaaacgtggatatcggcacgacggttttcctagactgtcgagccatggctgagccagaacctgaaatttactgggtcactcccattggaaataagataactgtggaaaccctttcagataaatacaagctaagtagcgaaggtaccttggaaatatctaacatacaaattgaagactcaggaagatacacatgtgttgcccagaatgtccaaggggcagacactcgggtggcaacaattaaggttaacgggacccttctggatggtacccaggtgctaaaaatatacgtcaagcagacagaatcccattccatcttagtgtcctggaaagttaattccaatgtcatgacgtcaaacttaaaatggtcgtctgccaccatgaagattgataaccctcacataacatatactgccagggtcccagtcgatgtccatgaatacaacctaacgcatctgcagccttccacagattatgaagtgtgtctcacagtgtccaatattcatcagcagactcaaaagtcatgcgtaaatgtcacaaccaaaaatgccgccttcgcagtggacatctctgatcaagaaaccagtacagcccttgctgcagtaatggggtctatgtttgccgtcattagccttgcgtccattgctgtgtactttgccaaaagatttaagagaaaaaactaccaccactcattaaaaaagtatatgcaaaaaacctcttcaatcccactaaatgagctgtacccaccactcattaacctctgggaaggtgacagcgagaaagacaaagatggttctgcagacaccaagccaacccaggtcgacacatccagaagctattacatgtggtaactcagaggatattttgcttctggtagtaaggagcacaaagacgtttttgctttattctgcaaaagtgaacaagttgaagacttttgtatttttgactttgctagtttgtggcagagtggagaggacgggtggatatttcaaatttttttagtatagcgtatcgcaagggtttgacacggctgccagcgactctaggcttccagtctgtgtttggtttttattcttatcattattatgattgttattatattattattttattttagttgttgtgctaaactcaataatgctgttctaactacagtgctcaataaaatgattaatgacaggatggggttcccctgtgcttttaccagtagcatgaccccttctgaagccatccgtagaaagtactttgtcctccaaaaagctaacatacggttttgaagcagcattgaaacttttgtagcaatctggtctatagacttttaactcaagaagctaaggctagacttgttaccttcgttgaatgatgttagttgactgtactgtaatgttgtatcaactgaattgaatgtttgcctttaaacaatgaattttctttttctttccttttttttttttgttgtaatagttaaagaggcttagaacaagctaacaggcaatagaaatatgtatatcagattttttaatgtaacaaactacatgttaattgttatcttattctttttatctttagtagacacttttaaaagaaaagacaattttgttgtgtttaactcaccaacacgtggtgtataatgaagacagaactataataaattagttttgttctgattttttagaacacttgc

SEQ ID NO: 206 - protein, 730 aa, Homo sapiens
NFGVSGVELAQQASMARMSFVIAACQLVLGLLMTSLTESSIQNSECPQLCVCEIRPWFTPQSTYREATTVDCNDLRLTRIPSNLSSDTQVLLLQSNNIAKTVDELQQLFNLTELDFSQNNFTNIKEVGLANLTQLTTLHLEENQITEMTDYCLQDLSNLQELYINHNQISTISAHAFAGLKNLLRLHLNSNKLKVIDSRWFDSTPNLEILMIGENPVIGILDMNFKPLANLRSLVLAGMYLTDIPGNALVGLDSLESLSFYDNKLVKVPQLALQKVPNLKFLDLNKNPIHKIQEGDFKNMLRLKELGINNMGELVSVDRYALDNLPELTKLEATNNPKLSYIHRLAFRSVPALESLMLNNNALNAIYQKTVESLPNLREISIHSNPLRCDCVIHWINSNKTNIRFMEPLSMFCAMPPEYKGHQVKEVLIQDSSEQCLPMISHDSFPNRLNVDIGTTVFLDCRAMAEPEPEIYWVTPIGNKITVETLSDKYKLSSEGTLEISNIQIEDSGRYTCVAQNVQGADTRVATIKVNGTLLDGTQVLKIYVKQTESHSILVSWKVNSNVMTSNLKWSSATMKIDNPHITYTARVPVDVHEYNLTHLQPSTDYEVCLTVSNIHQQTQKSCVNVTTKNAAFAVDISDQETSTALAAVMGSMFAVISLASIAVYFAKRFKRKNYHHSLKKYMQKTSSIPLNELYPPLINLWEGDSEKDKDGSADTKPTQVDTSRSYYMW

SEQ ID NO: 207 - DNA, 6782 bp, Homo sapiens
cagggggagcaccgagcaccacggtgtcgtgcgcttcgaggcgcggcgtgggaagaaggctggttcattctgccacccctctgcattaagacacaaggtgctgaccgcagagacctgccatgaaaccacacttgaagcaatggagacaacgaatgcttttcggaatattcgcttgggggctcctctttttgctgattttcatctacttcaccgacagcaaccccgctgagcctgtacccagctccctctccttcctggagaccaggaggctcctgccggtgcaggggaagcagcgggccatcatgggcgccgcacatgagccctccccgcctgggggcctggacgcacgccaggcgctgccccgcgcccacccagccggttcctttcatgcggggcctggagacctgcagaaatgggcccagtcccaagatgggtttgaacataaagagtttttttcatcccaggtggggagaaaatctcaaagtgctttctacccggaggatgacgactacttttttgctgctggtcagccagggtggcacagccacactcaggggacattgggattcccttcccccggggagccaggcccacgggagggggcttttccggctgcacaggtccagaggaggcgggtgaagaagaggcaccggaggcagagaaggagccacgtgttggaggagggcgacgacggcgacaggctgtactcctccatgtccagggccttcctgtaccggctctggaaggggaacgtctcttccaaaatgctgaacccgcgcctgcagaaggcgatgaaggattacctgaccgccaacaagcacggggtgcgcttccgcgggaagcgggaggccgggctgagcagggcacagctgctgtgccagctgcggagccgcgcgcgcgtgcggacgctggacggcaccgaggcgcccttttctgcgctgggctggcggcgcctggtgcccgccgtgcccctgagccagctgcacccccgcggcctgcgcagctgcgctgtcgtcatgtctgcaggcgcaatcctcaactcttccttgggcgaggaaatagattctcatgatgcggttttgagatttaactctgctcctacacgtggttatgagaaagatgttgggaataaaaccaccatacgcatcattaattcgcagattctgaccaaccccagccatcacttcattgacagttcactgtataaagacgtcattttggtggcctgggaccctgccccatattccgcaaatcttaacctgtggtacaaaaaaccggattacaacctgttcactccatatattcagcatcgtcagagaaacccaaatcagccattttacattcttcatcctaaatttatatggcagctctgggatattatccaggagaacactaaagagaagattcaaccaaacccaccatcttctggtttcattggaatcctcatcatgatgtccatgtgcagagaggtgcacgtgtatgaatatatcccatccgtgcggcagacggagctgtgccactaccacgagctgtactacgacgcagcctgcaccctcggggcgtaccacccactactctatgagaagctcctggtgcagcgcctgaacatgggcacgcagggggatttgcatcgcaagggcaaggtggttcttcctggcttccaggcggtgcactgccctgcaccaagtccagtcattccacactcttaaaaagggtttcttgggaatcaatgtgcaataaggtactactgttgtactcaaagtcacaaaagaatacttgaagatagattttagacagtgtagttttgagtctttaaacagtaatttagtggtggtcatgataatccttctctttctaagccattgagtatgtattactgctttgaacatagaaatggtttttttaaaaaaataaggctcaagaaagatgcaaaaccaaggatagctagaaagaaaacacatgtatgaccatgggtatgatacctccagaaatgttaacaacttattcttctgccatgagtacccctcatcagggttggtttcaatgacaggttttggtgatgttcctgaccatatgaagtggtttatgtttagaaacattcaaattgagggacatcatttacagcatcgagtgtgtcagttatacatgcattcatcattaaatatcctaggttttatgacagacattgaaattatcactcagatgtgtttaacagcaaaaaattcccagcacatcctggcaaaggcttttatttccaaccgttgcattcttcatctctgcctcccattgcccactgaatgctttgctttctgtgcatcaagacagagttctaaaaccagaaaacatccatcttgaaaggtccaagaaaaagccaaattccatatagcaccacagaggaggccctttgtttccctgcagtatttcaaccaggaacattagtatcacatccaccaggaggcacatcactggcaagtaacatagaatcacagggctgcaggtgcccctggacactccccggttctggcttttctgccttgtacctcctcacctgcagatctaccctgcagcttttgcatagtcagtgacacacttgacaattggcacagctgtgctggggaagacgggagacaccttgctccttccaaactagaaggaaagattttggagccatcaccctgtgcttctagggatgcacgcctgtctttattatacaggtttcttgcaggtttttatcagccagtgggaactccacagtgatgagcactgaatcttcactaaatcttcctacagacatttaggaatccagtccttgcttttgcagatatgttttatgtcagcagcatgacaaagccatataattaaataatttatgtgaaagcattgcttattaacaaggaaaatatgtagatgcttcagagggaaaggcagctagagggaaattttcatcccaatatgttagctatattcagggttgattttttctttaatctcaactgtcactgatacattgaaaaatttttgctatgaatatagtgaaacagaaacattctgtaataccttaattaaacatgctattatttcaatgtataaccaaaacatatctccatggtacagttaagacttgttgcaatgacaatagcagcttaattaaatgcgttctcccttgcaaaatgtatgaatgtcaggagagtttagtggaaaagttttctttgtttcaggattggtttcttctagactgttctcaggactactttcttgagcaagaatggcttacagagactgaaggcttctgtttggttagtctattcagcagatatggagctggaaaacaagacatctcctatagcttgctataatagtgaaggagaaattggaaagttttaatcacaataatatccaataaaagcccattttgagagttttgttattaagtcaatgagaagggataggtaactttgtcctatatattaacttatgtctaaatagacatggttaagccatgttcctttctaatttcttttcttttcttttttttttttttttttttgagacagtctctcgctctgtcgcccaggctagagtgcagtggtgcgatcttggttcactgccagctctgcctcccacgttcacaccattctcctgcctcagcctcctgagtagctggggactacaggcacctgccaccacgcccagctaattttttgtatttttagtagagacagggtttcaccgtgttagccagggtggtctcgatctcctgaccttgtgatctgcctgcctcggcctcccaaagtgatgggattataggcgtgagccaccaccgcgcccggtcattcctttctaatttcttgaaaaaactttgtcttgtccttatgtttacatgtgtgtaataatttcagcaactctggaatgtgggtgaggtggctgtggtggatgaatattactccctaccctccttggatctttctagatcttccagaccattaaatgcccctgaagctccttttatagttttgcaagtggatttacttgtagacatccttactatccagcataatcccccttggctgacatgagaacttggttagaggagaatttattggggtcagtgtaaatattcaagttcaaaagcctcagaacccaacactttaaagatttttaaatggaattttgtcgtagtcattgtacttttaaaatagtactttcagtttcattgaggttacaagaaagactgaagagtacaaaggaaatttagttacaatttttgcatttattatggccttaaagactcttgggaatcaggctctgttcaacagtcaataaatgtaatacacacattaatatagtactgactgggcgttcttctataaaagtttaagttctttggcttctaagaaaatgttgggcagttacagttaacttgatgactacttctggtattagccaaatgggtcctaagtggcagcattttgccagacattgactaaatccttacatgccacatttactgaattccaataaacatatagttcttctgtggagtagttaacagtaagtggcagctcactgaatttctcccaggttctgtctcttccaaaatcctccatcctctcttatgaagggaagctgataaaaaaaaatcctcttggtgcaagctgaagctgttaaggattccttttttcactctcaggaccaacagacattcttttgtatttcaagataatttcacctgttgttgttgttgttgttgttgttgttgttgttgttgttgttacaaagaaacaaattttgagcagcaatgacaattcaaccatatctagattctccctaccttatttctccagccagtcacaccaggcagacgggtaacctttaacagacctggtgttctcatggaataccgatgctcgtcccagggagctgacctttctcactatgtccttatagagctgctcttacagagaactttgtgctcaggaccaagggatggtcaattaaaagttgcatgtaagcatcaggcttggatgggcaagggagggcttttatacatctttgaacgaccaggtctttccttgtctgcctgaaggcagagcttcgagaaacagcacttcccatgtgtctggtcctcttggtctctcagccagacacttaatcaatcctggactctccagtagtcctcagtcattgtagccatagcatctgcaaaaaaagaaatgctaaaataatcattagcgttttcaaaattaggaaatcaaagtagctgggtcactctcttacatgtgtatgagccagttaattctgctggacagatcatacttacgctgctgattgactcttctgagcagtaacacatctcctgaattaattaggtaggtcccgtttgggtgctttaagtgggatcagtcttagatgagtgccagtatgtgattgaatttcatacgcacaaatgccatgattcaagttctctctccagtttttcttatagatcaacacacagtacatgtggtcagttacttggttgaatttctgcttagctgtggtaagagacagagaaagggagtgaggtgggaccaggggaattatcagaaagacatgagtgaacctattggccaggtagcttccaagtatgttctattgtattgtctgttttgattctgatagtttagaactctttctgatagtttagaactcttacccagtggttacatgactgatcaaggcaactccatctggaaattaattgcttgggtaaaatgtccctgagtttcaacttgtcttttatctctggatattctcttatgagattattatgcatgtttctgtcacatgggcattatttacacacttgataaatgaaaggtatttctctgtccgttcaaggaaataaaatgtaagttcttgttttattaaatgaatgaagccttttggttaaaaaaaaagtaatgtaatatgtttctgttcaaacttgagctaatgacatttaaggaattaaagacattgatctagttcttagtatgaaaagtgtacatgtagatatagttatataattgtgtatatacatatctacacacatggttggttttatattgctttttcatcaatatttttgactgaaacctttacaataaattttattttaattatgtaaccactaatattttgagagaaggaagcaaatgttatatgtccttctgttaaaagaaaaaaaattcagtcctccgccaaccgcttcccacacactcatactctgcacatcttggctacattaaaatggactgacagaattatttaaaaggcactatgaaggtagaacactaccttaatattttatcctagtcagaagcctgatttaacactgaactttgaagggaagcttagctgtagctcatggctttcaaagattagaagaaacatttactggttctatggaaaatagtcttcttgctaggtagattggaaacaaagaaattgcattggtggtgttaaaatctaacatttataacaaatcctgttttattctagatgaaatacttagacaattcttccagtggaaaccagtgaacttttttaacagctttgggaattcttttgtatgataatttttaaaatgaaatgtgtactcttcaaactaattaaagcttgaagttttccaggagtcgcattttaaaagtgtttgtacacattttaacacttggatattttctattttggttttgtatatttttatgtatacacaatgtacagacttttttcttgtaaataaaacatgttttcatttgtct

SEQ ID NO: 208 - protein, 534 aa, Homo sapiens
PQRPAMKPHLKQWRQRMLFGIFAWGLLFLLIFIYFTDSNPAEPVPSSLSFLETRRLLPVQGKQRAIMGAAHEPSPPGGLDARQALPRAHPAGSFHAGPGDLQKWAQSQDGFEHKEFFSSQVGRKSQSAFYPEDDDYFFAAGQPGWHSHTQGTLGFPSPGEPGPREGAFPAAQVQRRRVKKRHRRQRRSHVLEEGDDGDRLYSSMSRAFLYRLWKGNVSSKMLNPRLQKAMKDYLTANKHGVRFRGKREAGLSRAQLLCQLRSRARVRTLDGTEAPFSALGWRRLVPAVPLSQLHPRGLRSCAVVMSAGAILNSSLGEEIDSHDAVLRFNSAPTRGYEKDVGNKTTIRIINSQILTNPSHHFIDSSLYKDVILVAWDPAPYSANLNLWYKKPDYNLFTPYIQHRQRNPNQPFYILHPKFIWQLWDIIQENTKEKIQPNPPSSGFIGILIMMSMCREVHVYEYIPSVRQTELCHYHELYYDAACTLGAYHPLLYEKLLVQRLNMGTQGDLHRKGKVVLPGFQAVHCPAPSPVIPHS

SEQ ID NO: 209 - DNA, 2832 bp, Homo sapiens
cgctcccacccgcccgtggcccgcgcccatggccgcgcgcgctccacacaactcaccggagtccgcgccctgcgccgccgaccagttcgcagctccgcgccacggcagccagtctcacctggcggcaccgcccgcccaccgccccggccacagcccctgcgcccacggcagcaatcgaggcgaccgcgacagtggtgggggacgctgctgagtggaagagagcgcagcccggccaccggacctacttactcgccttgctgattgtctatttttgcgtttacaacttttctaagaacttttgtatacaaaggaactttttaaaaaagacgcttccaagttatatttaatccaaagaagaaggatctcggccaatttggggttttgggttttggcttcgttttttctcttcgttgactttggggttcaggtgccccagctgcttcgggctgccgaggaccttctgggcccccacattaatgaggcagccacctggcgagtctgacatggctgtcagcgacgcgctgctcccatctttctccacgttcgcgtctggcccggcgggaagggagaagacactgcgtcaagcaggtgccccgaataaccgctggcgggaggagctctcccacatgaagcgacttcccccagtgcttcccggccgcccctatgacctggcggcggcgaccgtggccacagacctggagagcggcggagccggtgcggcttgcggcggtagcaacctggcgcccctacctcggagagagaccgaggagttcaacgatctcctggacctggactttattctctccaattcgctgacccatcctccggagtcagtggccgccaccgtgtcctcgtcagcgtcagcctcctcttcgtcgtcgccgtcgagcagcggccctgccagcgcgccctccacctgcagcttcacctatccgatccgggccgggaacgacccgggcgtggcgccgggcggcacgggcggaggcctcctctatggcagggagtccgctccccctccgacggctcccttcaacctggcggacatcaacgacgtgagcccctcgggcggcttcgtggccgagctcctgcggccagaattggacccggtgtacattccgccgcagcagccgcagccgccaggtggcgggctgatgggcaagttcgtgctgaaggcgtcgctgagcgcccctggcagcgagtacggcagcccgtcggtcatcagcgtcagcaaaggcagccctgacggcagccacccggtggtggtggcgccctacaacggcgggccgccgcgcacgtgccccaagatcaagcaggaggcggtctcttcgtgcacccacttgggcgctggaccccctctcagcaatggccaccggccggctgcacacgacttccccctggggcggcagctccccagcaggactaccccgaccctgggtcttgaggaagtgctgagcagcagggactgtcaccctgccctgccgcttcctcccggcttccatccccacccggggcccaattacccatccttcctgcccgatcagatgcagccgcaagtcccgccgctccattaccaagagctcatgccacccggttcctgcatgccagaggagcccaagccaaagaggggaagacgatcgtggccccggaaaaggaccgccacccacacttgtgattacgcgggctgcggcaaaacctacacaaagagttcccatctcaaggcacacctgcgaacccacacaggtgagaaaccttaccactgtgactgggacggctgtggatggaaattcgcccgctcagatgaactgaccaggcactaccgtaaacacacggggcaccgcccgttccagtgccaaaaatgcgaccgagcattttccaggtcggaccacctcgccttacacatgaagaggcatttttaaatcccagacagtggatatgacccacactgccagaagagaattcagtattttttacttttcacactgtcttcccgatgagggaaggagcccagccagaaagcactacaatcatggtcaagttcccaactgagtcatcttgtgagtggataatcaggaaaaatgaggaatccaaaagacaaaaatcaaagaacagatggggtctgtgactggatcttctatcattccaattctaaatccgacttgaatattcctggacttacaaaatgccaagggggtgactggaagttgtggatatcagggtataaattatatccgtgagttgggggagggaagaccagaattcccttgaattgtgtattgatgcaatataagcataaaagatcaccttgtattctctttaccttctaaaagccattattatgatgttagaagaagaggaagaaattcaggtacagaaaacatgtttaaatagcctaaatgatggtgcttggtgagtcttggttctaaaggtaccaaacaaggaagccaaagttttcaaactgctgcatactttgacaaggaaaatctatatttgtcttccgatcaacatttatgacctaagtcaggtaatatacctggtttacttctttagcatttttatgcagacagtctgttatgcactgtggtttcagatgtgcaataatttgtacaatggtttattcccaagtatgccttaagcagaacaaatgtgtttttctatatagttccttgccttaataaatatgtaatataaatttaagcaaacgtctattttgtatatttgtaaactacaaagtaaaatgaacattttgtggagtttgtattttgcatactcaaggtgagaattaagttttaaataaacctataatattttatctgaaaaaaaaaaaaaaaaaaa

SEQ ID NO: 210 - protein, 479 aa, Homo sapiens
MRQPPGESDMAVSDALLPSFSTFASGPAGREKTLRQAGAPNNRWREELSHMKRLPPVLPGRPYDLAAATVATDLESGGAGAACGGSNLAPLPRRETEEFNDLLDLDFILSNSLTHPPESVAATVSSSASASSSSSPSSSGPASAPSTCSFTYPIRAGNDPGVAPGGTGGGLLYGRESAPPPTAPFNLADINDVSPSGGFVAELLRPELDPVYIPPQQPQPPGGGLMGKFVLKASLSAPGSEYGSPSVISVSKGSPDGSHPVVVAPYNGGPPRTCPKIKQEAVSSCTHLGAGPPLSNGHRPAAHDFPLGRQLPSRTTPTLGLEEVLSSRDCHPALPLPPGFHPHPGPNYPSFLPDQMQPQVPPLHYQELMPPGSCMPEEPKPKRGRRSWPRKRTATHTCDYAGCGKTYTKSSHLKAHLRTHTGEKPYHCDWDGCGWKFARSDELTRHYRKHTGHRPFQCQKCDRAFSRSDHLALHMKRHF

SEQ ID NO: 211 - DNA, 1186 bp, Homo sapiens
aggaatctgcgctcgggttccgcagatgcagaggttgaggtggctgcgggactggaagtcatcgggcagaggtctcacagcagccaaggaacctggggcccgctcctcccccctccaggccatgaggattctgcagttaatcctgcttgctctggcaacagggcttgtagggggagagaccaggatcatcaaggggttcgagtgcaagcctcactcccagccctggcaggcagccctgttcgagaagacgcggctactctgtggggcgacgctcatcgcccccagatggctcctgacagcagcccactgcctcaagccccgctacatagttcacctggggcagcacaacctccagaaggaggagggctgtgagcagacccggacagccactgagtccttcccccaccccggcttcaacaacagcctccccaacaaagaccaccgcaatgacatcatgctggtgaagatggcatcgccagtctccatcacctgggctgtgcgacccctcaccctctcctcacgctgtgtcactgctggcaccagctgcctcatttccggctggggcagcacgtccagcccccagttacgcctgcctcacaccttgcgatgcgccaacatcaccatcattgagcaccagaagtgtgagaacgcctaccccggcaacatcacagacaccatggtgtgtgccagcgtgcaggaagggggcaaggactcctgccagggtgactccgggggccctctggtctgtaaccagtctcttcaaggcattatctcctggggccaggatccgtgtgcgatcacccgaaagcctggtgtctacacgaaagtctgcaaatatgtggactggatccaggagacgatgaagaacaattagactggacccacccaccacagcccatcaccctccatttccacttggtgtttggttcctgttcactctgttaataagaaaccctaagccaagaccctctacgaacattctttgggcctcctggactacaggagatgctgtcacttaataatcaacctggggttcgaaatcagtgagacctggattcaaattctgccttgaaatattgtgactctgggaatgacaacacctggtttgttctctgttgtatccccagccccaaagacagctcctggccatatatcaaggtttcaataaatatttgctaaatgagtg

SEQ ID NO: 212 - protein, 250 aa, Homo sapiens
MRILQLILLALATGLVGGETRIIKGFECKPHSQPWQAALFEKTRLLCGATLIAPRWLLTAAHCLKPRYIVHLGQHNLQKEEGCEQTRTATESFPHPGFNNSLPNKDHRNDIMLVKMASPVSITWAVRPLTLSSRCVTAGTSCLISGWGSTSSPQLRLPHTLRCANITIIEHQKCENAYPGNITDTMVCASVQEGGKDSCQGDSGGPLVCNQSLQGIISWGQDPCAITRKPGVYTKVCKYVDWIQETMKNN

SEQ ID NO: 213 - DNA, 786 bp, Homo sapiens
atgtgggacctggttctctccatcgccttgtctgtggggtgcactggtgccgtgcccctcatccagtctcggattgtgggaggctgggagtgtgagaagcattcccaaccctggcaggtggctgtgtacagtcatggatgggcacactgtgggggtgtcctggtgcacccccagtgggtgctcacagctgcccattgcctaaagaagaatagccaggtctggctgggtcggcacaacctgtttgagcctgaagacacaggccagagggtccctgtcagccacagcttcccacacccgctctacaatatgagccttctgaagcatcaaagccttagaccagatgaagactccagccatgacctcatgctgctccgcctgtcagagcctgccaagatcacagatgttgtgaaggtcctgggcctgcccacccaggagccagcactggggaccacctgctacgcctcaggctggggcagcatcgaaccagaggagttcttgcgccccaggagtcttcagtgtgtgagcctccatctcctgtccaatgacatgtgtgctagagcttactctgagaaggtgacagagttcatgttgtgtgctgggctctggacaggtggtaaagacacttgtgggggtgattctgggggtccacttgtctgtaatggggtgcttcaaggtatcacatcatggggccctgagccatgtgccctgcctgaaaagcctgctgtgtacaccaaggtggtgcattaccggaagtggatcaaggacaccatcgcagccaacccctga

SEQ ID NO: 214 - protein, 261 aa, Homo sapiens
MWDLVLSIALSVGCTGAVPLIQSRIVGGWECEKHSQPWQVAVYSHGWAHCGGVLVHPQWVLTAAHCLKKNSQVWLGRHNLFEPEDTGQRVPVSHSFPHPLYNMSLLKHQSLRPDEDSSHDLMLLRLSEPAKITDVVKVLGLPTQEPALGTTCYASGWGSIEPEEFLRPRSLQCVSLHLLSNDMCARAYSEKVTEFMLCAGLWTGGKDTCGGDSGGPLVCNGVLQGITSWGPEPCALPEKPAVYTKVVHYRKWIKDTIAANP

SEQ ID NO: 215 - DNA, 1725 bp, Homo sapiens
ggcacgaggggccaagcaagcttctatctgcacctgctctcaatcctgctctcaccatgagcctccgcctgcagagctcctctgccagctatggaggtggtttcgggggtggctcttgccagctgggaggaggccgtggtgtctctacctgttcaactcggtttgtgtctgggggatcagctgggggctatggaggcggcgtgagctgtggttttggtggaggggctggtagtggctttggaggtggctatggaggtggccttggaggtggctatggaggtggccttggaggtggctttggtgggggttttgctggtggctttgttgactttggtgcttgtgatggcggcctcctcactggcaatgagaagatcaccatgcagaacctcaacgaccgcctggcttcctacctggagaaggtgcgcgccctggaggaggccaacgctgacctggaggtgaagatccgtgactggcacctgaagcagagcccagctagccctgagcgggactacagcccctactacaagaccattgaagagctccgggacaagatcctgaccgccaccattgaaaacaaccgggtcatcctggagattgacaatgccaggctggctgtggacgacttcaggctcaagtatgagaatgagctggccctgcgccagagcgtggaggccgacatcaacggcctgcgccgggtgctggatgagctcactctgtctaagactgacctggagatgcagatcgagagcctgaatgaagagctagcctacatgaagaagaaccatgaagaggagatgaaggaatttagcaaccaggtggtcggccaggtcaacgtggagatggatgccaccccaggcattgacctgacccgcgtgctggcagagatgagggagcagtacgaggccatggcagagaggaaccgccgggatgctgaggaatggttccacgccaagagtgcagagctgaacaaggaggtgtctaccaacactgccatgattcagaccagcaagacagagatcacggagctcaggcgcacgctccaaggcctggagattgagctgcagtcccagctgagcatgaaagcggggctggagaacacggtggcagagacggagtgccgctatgccctgcagctgcagcagatccagggactcatcagcagcatcgaggcccagctgagcgagctccgcagtgagatggagtgccagaaccaagagtacaagatgctgctggacatcaagacacgtctggagcaggagatcgccacctaccgcagcctgctcgagggccaggacgccaagatgattggtttcccttcctcagcaggaagcgtcagcccccgtagcacctctgttaccacgacttctagtgcctctgttaccaccacctctaatgcctctggtcgccgcacttctgatgtccgtaggccttaaatctgcctggcgtcccctccctctgtcttcagcacccagaggaggagagagccggcagttccctgcaggagagaggaggggctgctggacccaaggctcagtccctctgctctcaggaccccctgtcctgactctctcctgatggtgggccctctgtgctcttctcttcctgtcggatctctctcctctctgacctggatacgctttggtttctcaacttctctaccccaaagaaaagattattcaataaagtttcctgcctttctgcaaacataaaaaaaaaaaaaaaaaa

SEQ ID NO: 216 - protein, 458 aa, Homo sapiens
MSLRLQSSSASYGGGFGGGSCQLGGGRGVSTCSTRFVSGGSAGGYGGGVSCGFGGGAGSGFGGGYGGGLGGGYGGGLGGGFGGGFAGGFVDFGACDGGLLTGNEKITMQNLNDRLASYLEKVRALEEANADLEVKIRDWHLKQSPASPERDYSPYYKTIEELRDKILTATIENNRVILEIDNARLAVDDFRLKYENELALRQSVEADINGLRRVLDELTLSKTDLEMQIESLNEELAYMKKNHEEEMKEFSNQVVGQVNVEMDATPGIDLTRVLAEMREQYEAMAERNRRDAEEWFHAKSAELNKEVSTNTAMIQTSKTEITELRRTLQGLEIELQSQLSMKAGLENTVAETECRYALQLQQIQGLISSIEAQLSELRSEMECQNQEYKMLLDIKTRLEQEIATYRSLLEGQDAKMIGFPSSAGSVSPRSTSVTTTSSASVTTTSNASGRRTSDVRRP

SEQ ID NO: 217 - DNA, 2529 bp, Homo sapiens
gcatcctttttgggctgctcacagcccccagcctctatggtgaagacatacttgctagcagcgtcaccaacttgctgccaagagatcagtgctgcaaggcaaggttatttctaactgagcagagcctgccaggaagaaagcgtttgcaccccacaccactgtgcaggtgtgaccggtgagctcacagctgccccccaggcatgcccagcccacttaatcattcacagctcgacagctctctcgcccagcccagttctggaagggataaaaagggggcatcaccgttcctgggtaacagagccaccttctgcgtcctgctgagctctgttctctccagcacctcccaacccactagtgcctggttctcttgctccaccaggaacaagccaccatgtctcgccagtcaagtgtgtccttccggagcgggggcagtcgtagcttcagcaccgcctctgccatcaccccgtctgtctcccgcaccagcttcacctccgtgtcccggtccgggggtggcggtggtggtggcttcggcagggtcagccttgcgggtgcttgtggagtgggtggctatggcagccggagcctctacaacctggggggctccaagaggatatccatcagcactagaggaggcagcttcaggaaccggtttggtgctggtgctggaggcggctatggctttggaggtggtgccggtagtggatttggtttcggcggtggagctggtggtggctttgggctcggtggcggagctggctttggaggtggcttcggtggccctggctttcctgtctgccctcctggaggtatccaagaggtcactgtcaaccagagtctcctgactcccctcaacctgcaaatcgaccccagcatccagagggtgaggaccgaggagcgcgagcagatcaagaccctcaacaataagtttgcctccttcatcgacaaggtgcggttcctggagcagcagaacaaggttctggacaccaagtggaccctgctgcaggagcagggcaccaagactgtgaggcagaacctggagccgttgttcgagcagtacatcaacaacctcaggaggcagctggacagcatcgtgggggaacggggccgcctggactcagagctgagaaacatgcaggacctggtggaagacttcaagaacaagtatgaggatgaaatcaacaagcgtaccactgctgagaatgagtttgtgatgctgaagaaggatgtagatgctgcctacatgaacaaggtggagctggaggccaaggttgatgcactgatggatgagattaacttcatgaagatgttctttgatgcggagctgtcccagatgcagacgcatgtctctgacacctcagtggtcctctccatggacaacaaccgcaacctggacctggatagcatcatcgctgaggtcaaggcccagtatgaggagattgccaaccgcagccggacagaagccgagtcctggtatcagaccaagtatgaggagctgcagcagacagctggccggcatggcgatgacctccgcaacaccaagcatgagatcacagagatgaaccggatgatccagaggctgagagccgagattgacaatgtcaagaaacagtgcgccaatctgcagaacgccattgcggatgccgagcagcgtggggagctggccctcaaggatgccaggaacaagctggccgagctggaggaggccctgcagaaggccaagcaggacatggcccggctgctgcgtgagtaccaggagctcatgaacaccaagctggccctggacgtggagatcgccacttaccgcaagctgctggagggcgaggaatgcagactcagtggagaaggagttggaccagtcaacatctctgttgtcacaagcagtgtttcctctggatatggcagtggcagtggctatggcggtggcctcggtggaggtcttggcggcggcctcggtggaggtcttgccggaggtagcagtggaagctactactccagcagcagtgggggtgtcggcctaggtggtgggctcagtgtggggggctctggcttcagtgcaagcagtggccgagggctgggggtgggctttggcagtggcgggggtagcagctccagcgtcaaatttgtctccaccacctcctcctcccggaagagcttcaagagctaagaacctgctgcaagtcactgccttccaagtgcagcaacccagcccatggagattgcctcttctaggcagttgctcaagccatgttttatccttttctggagagtagtctagaccaagccaattgcagaaccacattctttggttcccaggagagccccattcccagcccctggtctcccgtgccgcagttctatattctgcttcaaatcagccttcaggtttcccacagcatggcccctgctgacacgagaacccaaagttttcccaaatctaaatcatcaaaacagaatccccaccccaatcccaaattttgttttggttctaactacctccagaatgtgttcaataaaatgcttttataatat

SEQ ID NO: 218 - protein, 590 aa, Homo sapiens
MSRQSSVSFRSGGSRSFSTASAITPSVSRTSFTSVSRSGGGGGGGFGRVSLAGACGVGGYGSRSLYNLGGSKRISISTRGGSFRNRFGAGAGGGYGFGGGAGSGFGFGGGAGGGFGLGGGAGFGGGFGGPGFPVCPPGGIQEVTVNQSLLTPLNLQIDPSIQRVRTEEREQIKTLNNKFASFIDKVRFLEQQNKVLDTKWTLLQEQGTKTVRQNLEPLFEQYINNLRRQLDSIVGERGRLDSELRNMQDLVEDFKNKYEDEINKRTTAENEFVMLKKDVDAAYMNKVELEAKVDALMDEINFMKMFFDAELSQMQTHVSDTSVVLSMDNNRNLDLDSIIAEVKAQYEEIANRSRTEAESWYQTKYEELQQTAGRHGDDLRNTKHEITEMNRMIQRLRAEIDNVKKQCANLQNAIADAEQRGELALKDARNKLAELEEALQKAKQDMARLLREYQELMNTKLALDVEIATYRKLLEGEECRLSGEGVGPVNISVVTSSVSSGYGSGSGYGGGLGGGLGGGLGGGLAGGSSGSYYSSSSGGVGLGGGLSVGGSGFSASSGRGLGVGFGSGGGSSSSVKFVSTTSSSRKSFKS

SEQ ID NO: 219 - DNA, 597 bp, Homo sapiens
atgcccctaggtctcctgtggctgggcctagccctgttgggggctctgcatgcccaggcccaggactccacctcagacctgatcccagccccacctctgagcaaggtccctctgcagcagaacttccaggacaaccaattccaggggaagtggtatgtggtaggcctggcagggaatgcaattctcagagaagacaaagacccgcaaaagatgtatgccaccatctatgagctgaaagaagacaagagctacaatgtcacctccgtcctgtttaggaaaaagaagtgtgactactggatcaggacttttgttccaggttgccagcccggcgagttcacgctgggcaacattaagagttaccctggattaacgagttacctcgtccgagtggtgagcaccaactacaaccagcatgctatggtgttcttcaagaaagtttctcaaaacagggagtacttcaagatcaccctctacgggagaaccaaggagctgacttcggaactaaaggagaacttcatccgcttctccaaatatctgggcctccctgaaaaccacatcgtcttccctgtcccaatcgaccagtgtatcgacggctga

SEQ ID NO: 220 - protein, 198 aa, Homo sapiens
MPLGLLWLGLALLGALHAQAQDSTSDLIPAPPLSKVPLQQNFQDNQFQGKWYVVGLAGNAILREDKDPQKMYATIYELKEDKSYNVTSVLFRKKKCDYWIRTFVPGCQPGEFTLGNIKSYPGLTSYLVRVVSTNYNQHAMVFFKKVSQNREYFKITLYGRTKELTSELKENFIRFSKYLGLPENHIVFPVPIDQCIDG

SEQ ID NO: 221 - DNA, 6079 bp, Homo sapiens
ggggacggcgccctcaccgcgagtcacttgtcagccctgtctgaggcggaggcagccccgcgccgcgccggacccgagcatatttcattttctgtcattggactttgagccattagaaccatgagcaactacagtgtgtcactggttggcccagctccttggggtttccggctgcagggcggtaaggatttcaacatgcctctgacaatctctagtctaaaagatggcggcaaggcagcccaggcaaatgtaagaataggcgatgtggttctcagcattgatggaataaatgcacaaggaatgactcatcttgaagcccagaataagattaagggttgtacaggctctttgaatatgactctgcaaagagcatctgctgcacccaagcctgagccggttcctgttcaaaagggagaacctaaagaagtagttaaacctgtgcccattacatctcctgctgtgtccaaagtcacttccacaaacaacatggcctacaataaggcaccacggccttttggttctgtgtcttcaccaaaagtcacatccatcccatcaccatcgtctgccttcaccccagcccatgcgaccacctcatcacatgcttccccttcacccgtggctgccgtcactcctcccctgttcgctgcatctggactgcatgctaatgccaatcttagtgctgaccagtctccatctgcactgagcgctggtaaaactgcagttaatgtcccacggcagcccacagtcaccagcgtgtgttccgagacttctcaggagctagcagagggacagagaagaggatcccagggtgacagtaaacagcaaaatggcccaccaagaaaacacattgtggagcgctatacagagttttatcatgtacccactcacagtgatgccagcaagaagagactgattgaggatactgaagactggcgtccaagaactggaacaactcagtctcgctctttccgaatccttgcccagatcactgggactgaacatttgaaagaatctgaagccgataatacaaagaaggcaaataactctcaggagccttctccgcagttggcttcctcggtagcttccacacggagcatgcccgagagcctggacagcccaacctctggcagaccaggggttaccagcctcacaactgcagctgccttcaagcctgtaggatccactggcgtcatcaagtcaccaagctggcaacggccaaaccaaggagtaccttccactggaagaatctcaaacagcgctacttactcaggatcagtggcaccagccaactcagctttgggacaaacccagccaagtgaccaggacactttagtgcaaagagctgagcacattccagcagggaaacgaactccgatgtgcgcccattgtaaccaggtcatcagaggaccattcttagtggcactggggaaatcttggcacccagaagaattcaactgcgctcactgcaaaaatacaatggcctacattggatttgtagaggagaaaggagccctgtattgtgagctgtgctatgagaaattctttgcccctgaatgtggtcgatgccaaaggaagatccttggagaagtcatcaatgcgttgaaacaaacttggcatgtttcctgttttgtgtgtgtagcctgtggaaagcccattcggaacaatgtttttcacttggaggatggtgaaccctactgtgagactgattattatgccctctttggtactatatgccatggatgtgaatttcccatagaagctggtgacatgttcctggaagctctgggctacacctggcatgacacttgctttgtatgctcagtgtgttgtgaaagtttggaaggtcagacctttttctccaagaaggacaagcccctgtgtaagaaacatgctcattctgtgaatttttgaaagtcaacagttcaggagaagagaaggaatttgaagagaaaaaggaaaattaaaattactaattaatttttagattcaatatttatatggagttttgaaaaataatagtggccctgaaggaataaattccagctttaaaaaccaagtctgaggaaatatttggcttcataaagtaaagagacggtttggcatttattattactttttcctgtattttatgcccataaaataagctttataaaaaccaatttcctgatggactattaaattcatcttagaataaattagtgaagaatttaattttagaataaataatccaatctgaaataattataccttctttccttgttaggtagttatgagtaaatctgcaaaaggcaatgaaaatgccttaaattttatcaataacagaattattgtatttaaaaaaaaactaatacttatctttaaaatagtaaataggattttaaacagagaattttatcagtaataggtgtcagtttttaaaaaattgcttgtaggctgagcgcggtggctcacgcctgtaatcccagcactttgggaggccaaggtgggtggaccacatgaggtcaggagtttgagatcagcctggccaacatggtgaaaccccatctctactaaaaatacaaaaattagccggacgcagtggcacgcgcctgtaatcccagctactcaagaggctgaggcacgagaatcacttgaacccgggagggagaggttgcagtgagccaagatcgtaccactgcactccagcctgggtgacagagtgagactctgtctccaaaaaaaaactttgcttgtatattatttttgccttacagtggatcattctagtaggaaaggacaataagattttttatcaaaatgtgtcatgccagtaagagatgttatattcttttctcatttcttccccacccaaaaataagctaccatatagcttataagtctcaaatttttgccttttactaaaatgtgattgtttctgttcattgtgtatgcttcatcacctatattaggcaaattccatttttttcccttgtgctaaggtaaagatttaattaaataattttggcctctcatagttttctctctctttaaagagaataaatagagggccaggtgtggtggctcacgcctgtgatcccagcactttgggaggccaagacgggcggatcatgaggtcaagagatcaagatcatcctggccaacatggtgaaaccctgtctctactaaaaatacaaaaatgagctgggcatggtggggcgtgcctgtagtcccatgtacttgggaggctgaggcaggaaaattcttgaacccaggagacggaagttgcagtgagctgagatcacaccactgcactccagcctggtgacagagcaagactccggctcttaaaaaaaaaaaaaaaaaaaaaaaaaaagagagagagaataaatagaaaagaatgtggctgggaattgtgaatcagaagattataccccccaattgtttttcaatccccttttctcaaataataaattagttaaatcagtttctgagttatgccactggctgatgaagagttgagaggtctctttgcagaatgatctttttgtttcgttttgtttcttcttctgcatttaaaaattaaaagattggtttgaggatgtgatgaaattgagactttttgtggttttctctcaataataagtgaaccaatttcaaatgtgatcacaaagtttggaaagcttttattcacagaggttgggtagtgttgggaggggagtttaattactcagattggcctgttatttgatttcctcctttgggaaaagaattatgtagataccacatggagacagggaaacaattgtggtaaaactgtggatcctgttgctatttgcccagtgagaaaacagattctggtatttgatttggtttttctctttgtttccagaatggatgaaagtccatgaacctcctaagttataatttaaatttgtttggggcaaggtgattttatagtcgagacagagccctaggtccttcctgccccatcactcacttacgacatcacttccattgtgtgcatgtttgttatagaggaggttttaggctacaatatttgtttaacctccctaagaactttcaaggcatctgtcctgaaagctgttaatttatggtctagcagatttatattatatgcagataataattaactggggataaaagaatggcaaggggtgacacaaagtagcaaactgaatacttctccaatagcaaccccaagctacctcctcaccctgcatcttggagggaggcaggaaatttcttttgaaataaagtgctggagctgaattctgcattatttatcgttgctgctgaaaccacctataaaagacttgctggctaatgtgcattgtcatataatgtacactgtcacatctttacagtcttgtatgttatagaatacaaaataagttgatggttttgtttggtgtgagctttttgtttgtttagttttgccttcataggttatatgccaagatagtatttgataagtcaatgacatttggatgttttcttcaaagaattttatttgacccagatttcttataaagttatcttacattaaggatgtcattttcatcagaccttctttctacatattattcatgaagcataatgttgcatttctccaaattttatgcctgaaagggtagtgttgcttcctaaggtatcatgttgtctttgtgctttgtccatctcttccgtggcgaagctttatatctgttcctaaaacagttaatcctgtgaaataaatattgaacataatccagaagaatctctctatttcccttggggaatgccatatttaattcaccagcagtaatcctttaataactggcagagcactttattcttctggtgagctccctgaatatttatttttctgattataaattttctatattagtagcattttttaattattacttcttcactatagagcatttacttttagtctctagatgtatattttggaatgctgtacttggcataacatagattaaaatcataatgcatgactaaaaactccttggatttatttcccattttaaaatttttagcggtaagttcagatttataatctttctctagacttccatggtctgaatgttgcctgctgaagtagcaacctaaaaagtatcccctgcttatgcttctccagttggccctccatgtccataggcttcgcatctgtgattcagcccactgtgggtcaaaaatatttggggaaaaaatggatggttgcgcctttgctgaacatgtacaaacttgtttttgtcattaaacaatatagtataacaactatttacaaagcatttacattgtattagctattataggtaatctagagatgatttaaagtgtatggtaggatgtgcacaggttatatgcaaatactacaccattttctataagggacttgaacatcatggactttagtatcctagggggttcttggaacccatcacccataggggcaccataggacaactatagtaccgtgtttatttcctattaattcaggttccgtttagagtctaaaactaaaacctaatcatttagtcacagtgtaaaaacaaatggaaataacagctcaaatcttcaaaatattaccatagcattatgtttaaaataatctacaacaaaaatgtaccattttcaagcagtactacattaggagcccttttatagaaaataatttcttctttacccccgttccagtgtgaatctagtattctgttaacatttgtgtggcatttggagtttgtcatccccattgaagggagagccttctcagacatgaagcaagggaaacatactgaatagttttacacaaatttgatctggcttccatttgtccccctcatttcccaaatgtttaaatgtattggatttgggttctcaatgtatawgttgccttatctgttaatgtctatcttctgtctctttaattttgtatatctgctgttttgcttttggatacattttctaattagaagtcacatgataaatataatcagtatagtaataataccataatgtgcacatactcaataaataaatgactgcattgttgyaaaaaaaaaaaaaaaaaaaa

SEQ ID NO: 222 - protein, 596 aa, Homo sapiens
MSNYSVSLVGPAPWGFRLQGGKDFNMPLTISSLKDGGKAAQANVRIGDVVLSIDGINAQGMTHLEAQNKIKGCTGSLNMTLQRASAAPKPEPVPVQKGEPKEVVKPVPITSPAVSKVTSTNNMAYNKAPRPFGSVSSPKVTSIPSPSSAFTPAHATTSSHASPSPVAAVTPPLFAASGLHANANLSADQSPSALSAGKTAVNVPRQPTVTSVCSETSQELAEGQRRGSQGDSKQQNGPPRKHIVERYTEFYHVPTHSDASKKRLIEDTEDWRPRTGTTQSRSFRILAQITGTEHLKESEADNTKKANNSQEPSPQLASLVASTRSMPESLDSPTSGRPGVTSLTTAAAFKPVGSTGVIKSPSWQRPNQGVPSTGRISNSATYSGSVAPANSALGQTQPSDQDTLVQRAEHIPAGKRTPMCAHCNQVIRGPFLVALGKSWHPEEFNCAHCKNTMAYIGFVEEKGALYCELCYEKFFAPECGRCQRKILGEVINALKQTWHVSCFVCVACGKPIRNNVFHLEDGEPYCETDYYALFGTICHGCEFPIEAGDMFLEALGYTWHDTCFVCSVCCESLEGQTFFSKKDKPLCKKHAHSVNF

SEQ ID NO: 223 - DNA, 3287 bp, Homo sapiens
agactgaggcggaggcagccccgcgccgcgccggacccgagcatatttcattttctgtcattggactttgagccattagaaccatgagcaactacagtgtgtcactggttggcccagctccttggggtttccggctgcagggcggtaaggatttcaacatgcctctgacaatctctagtctaaaagatggcggcaaggcagcccaggcaaatgtaagaataggcgatgtggttctcagcattgatggaataaatgcacaaggaatgactcatcttgaagcccagaataagattaagggttgtacaggctctttgaatatgactctgcaaagagcatctgctgcacccaagcctgagccggttcctgttcaaaagggagaacctaaagaagtagttaaacctgtgcccattacatctcctgctgtgtccaaagtcacttccacaaacaacatggcctacaataaggcaccacggccttttggttctgtgtcttcaccaaaagtcacatccatcccatcaccatcgtctgccttcaccccagcccatgcgaccacctcatcacatgcttccccttcacccgtggctgccgtcactcctcccctgttcgctgcatctggactgcatgctaatgccaatcttagtgctgaccagtctccatctgcactgagcgctggtaaaactgcagttaatgtcccacggcagcccacagtcaccagcgtgtgttccgagacttctcaggagctagcagagggacagagaagaggatcccagggtgacagtaaacagcaaaatggcccaccaagaaaacacattgtggagcgctatacagagttttatcatgtacccactcacagtgatgccagcaagaagagactgattgaggatactgaagactggcgtccaagaactggaacaactcagtctcgctctttccgaatccttgcccagatcactgggactgaacatttgaaagaatctgaagccgataatacaaagaaggcaaataactctcaggagccttctccgcagttggcttccttggtagcttccacacggagcatgcccgagagcctggacagcccaacctctggcagaccaggggttaccagcctcacaactgcagctgccttcaagcctgtaggatccactggcgtcatcaagtcaccaagctggcaacggccaaaccaaggagtaccttccactggaagaatctcaaacagcgctacttactcaggatcagtggcaccagccaactcagctttgggacaaacccagccaagtgaccaggacactttagtgcaaagagctgagcacattccagcagggaaacgaactccgatgtgcgcccattgtaaccaggtcatcagaggaccattcttagtggcactggggaaatcttggcacccagaagaattcaactgcgctcactgcaaaaatacaatggcctacattggatttgtagaggagaaaggagccctgtattgtgagctgtgctatgagaaattctttgcccctgaatgtggtcgatgccaaaggaagatccttggagaagtcatcaatgcgttgaaacaaacttggcatgtttcctgttttgtgtgtgtagcctgtggaaagcccattcggaacaatgtttttcacttggaggatggtgaaccctactgtgagactgattattatgccctctttggtactatatgccatggatgtgaatttcccatagaagctggtgacatgttcctggaagctctgggctacacctggcatgacacttgctttgtatgctcagtgtgttgtgaaagtttggaaggtcagacctttttctccaagaaggacaagcccctgtgtaagaaacatgctcattctgtgaatttttgaaagtcaacagttcaggagaagagaaggaatttgaagagaaaaaggaaaattaaaattactaattaatttttagattcaatatttatatggagttttgaaaaataatagtggccctgaaggaataaattccagctttaaaaaccaagtctgaggaaatatttggcttcataaagtaaagagacggtttggcatttattattactttttcctgtattttatgcccataaaataagctttataaaaaccaatttcctgatggactattaaattcatcttagaataaattagtgaagaatttaattttagaataaataatccaatctgaaataattataccttctttccttgttaggtagttatgagtaaatctgcaaaaggcaatgaaaatgccttaaattttatcaataacagaattattgtatttaaaaaaaaactaatacttatctttaaaatagtaaataggattttaaacagagaattttatcagtaataggtgtcagtttttaaaaaattgcttgtaggctgagcgcggtggctcacgcctgtaatcccagcactttgggaggccaaggtgggtggaccacatgaggtcaggagtttgagatcagcctggccaacatggtgaaaccccatctctactaaaaatacaaaaattagccggacgcagtggcacgcgcctgtaatcccagctactcaagaggctgaggcacgagaatcacttgaacccgggagggagaggttgcagtgagccaagatcgtaccactgcactccagcctgggtgacagagtgagactccgtctccaaaaaaaaactttgcttgtatattatttttgccttacagtggatcattctagtaggaaaggacaataagattttttatcaaaatgtgtcatgccagtaagagatgttatattcttttcttatttcttccccacccaaaaataagctaccatatagcttataagtctcaaatttttgccttttactaaaatgtgattgtttctgttcattgtgtatgcttcatcacctatattaggcaaattccattttttcccttgcgctaaggtaaagatttaattaaataattttggcctctcatagttttctctctctttaaagagaataaatagagggccaggtgtggtggctcacgcctgtgatcccagcactttgggaggccaagacgggcggatcatgaggtcaagagatcaagatcatcctggccaacatggtgaaaccctgtctctactaaaaatacaaaaatgagctgggcatggtggggcgtgcctgtagtcccatgtacttgggaggctgaggcaggaaaattcttgaacccaggagacggaagttgcagtgagctgagatcacaccactgcactccagcctggtgacagagcaagactccggctctt

SEQ ID NO: 224 - DNA, 3881 bp, Homo sapiens
gctgaagtgttcgaccagcaggaggttttctcctcagcccactcgctgcatccagatcagctcaccccgcgccctttcctgcccaccaggactctgatagcccctggcagccacagcccattttgccaagatgtctagagtagccaaatatcgccggcagtgagtgaagaccccgacatcgacagcctgctgggaccctgtctcccgaggagatggaggagctggagaaggagctggacgtggtggacccagacgggagtgttcccgtggggctgcggcagagaaaccagacggagaaacagtccacgggtgtgtacaaccgggaggccatgctcaacttctgtgaaaaggagaccaagaaacttatgcagagggagatgtccatggatgaaagcaagcaagtggagaccaagacagatgccaagaatggacaggaaaggggcagagatgccagcaaaaaagccctgggccccagacggaactcagatctggggaaggagccaaagaggggtggtttaaagaaaagcttctctagagacagagatgaagctggtggcaagagtggcgagaagcccaaggaggagaagatcatccggggcattgacaagggccgggtcagggctgcagtggataagaaggaggcagggaaggatgggagaggagaggagagggcagtggccaccaagaaggaagaggagaagaaagggggtgacaggaacacaggcttgagcagggacaaggataaaaagagagaggagatgaaggaggtggccaagaaagaggatgatgagaaggtaaaaggggagcgtaggaacacagacaccagaaaagagggtgagaagatgaaaagagcaggtgggaacacagacatgaaaaaggaggatgagaaggtaaaaagaggaactgggaacacagacaccaaaaaggacgatgaaaaagtcaagaagaatgaacccttacatgaaaaggaagccaaggatgacagcaagaccaaaacacccgagaaacagacgcccagtggccccaccaagccctctgaaggaccggccaaggtggaggaggaggcagctcccagcatatttgatgagcctctggagagagtgaagaacaatgaccccgagatgactgaggtgaacgtcaacaactcagactgcatcacaaatgagatcttggtccggtttactgaggctctggagttcaacactgtggttaagctgttcgccttggccaacacgcgagccgatgaccacgtggcctttgccattgccatcatgctcaaggccaacaagaccatcaccagcctcaacctggactccaaccacatcacaggcaaaggcatcctggccatcttccgggccctcctccagaacaacacgctgaccgagctccgcttccacaaccagcgacacatctgtggaggcaagacggagatggagatcgccaagctgctgaaggagaatacctccctgctcaagctgggctaccattttgagctggccgggccccgaatgactgtcaccaatctgctcagccgcaacatggacaagcagagacaaaagcggctgcaggagcaaaggcaggcacaggaagccaagggagagaagaaggatctgctggaggtacccaaggccggggccgtggctaagggctccccaaaaccttcacctcaaccatctccaaagccctctccaaagaactcacccaaaaaagggggtgctccagctgccccaccaccccctccccctcccttggctccaccccttatcatggagaacctgaagaattcactctcaccagctacccagaggaagatgggagacaaagtcctccctgcccaggagaagaactcccgtgaccagctattggctgccatccgctccagcaacctcaagcagctcaagaaggtggaagtgcccaaactgcttcagtaggaccaggctgccaggcaccatctgccaatgccatgactgctcaggcctcacctcccagggctacacagaccctgcccaccccatccctggctgacctgctgtggatgtccctattctgccatgggagcgtccaggcctgggtcacgctcaaggaaggatgccttatctcttctcactttccttttcttgtctctgaggctctccaaattttgctttagtacatggagctcaggtttctggacaagaagagtccttttagcacatcactgagaagatggcactgtccagggcccatgtagctggcaagctgcaaaaggcctgtgatccaggaaagatgtcccacagggaccacatccaccccagccccactgccctccagggccaggattcaggcctctgaggagcccacggggcaaagctgctgggccagtggcactctgtgtgggaaaatggcagaaagatggagaggcatgggggcccaaaggggagcgtggggaggggctgaggataccccaaagtccaggctaattagaggatgtggcaggggcagtggcctggatgcacagtgcctgatgggagtaggctccagacaggaggagtgggacagacagcagctggacttgaaggtttgatgccaaagcagacattttcctcacacccacctgctgctgtatgaatagctgtgtatctgtttttccataagattttgataatatatacaaacctttagctgtgaatggctgtgccccacctgttgtcctgaactgtgagtcctgatcctaaccctgggctccctggaggactctagaagctcaggttccctgccacactatttgagttggccaagaaataaattcacatcctcagaaagtgcagcatggaggaaaatctgaactctaagcagaagactctccactgacctggttgtccaggtctagaaggccaggcctctactaggtctgctcctgaaccagtcctgctgcctggagtcagtagccagagttgttctcaggggtgctggggcagagtggagcccagggtgctgggatggctatattaggcatgttcagggatgctcattccatgactctgcctaaccatgggctcagggccaggtcctcacagcagtcacaggcccaggaaggcggcaggcagagaagtggagtgactatttggagaatagcacccatatctgtgtgccctagggctcagaggggcctcatcttccccagccctccccacctgctcaccaattccacttcctgccccaactgcaggaatgctgacaatgctgccatgcccaccatcgggtgtaggtgaaaggcatctttctgaatttcattctcttgaaggtgctgccaccccttggcactgtggaactgccaccttgggtctgtgtcacttgtaggtttctctgcctccaggttgcctcaacagcaggaggcacagcagtttcaccatctttgaggtgagggtggggtgccccagctaggaagcaagatcgctgtgctaggtctgaccaaaaccagagggcagtctagtcctgggggtaaagccctcagatcccagggtacactcttctccattccctccacccacttgcctgtcaccccagtcacctaagcaatcactgggcccagaggagaggagacagacacacactggctcctggacctaaagggtatgagctggagctaaggccagctagagcttccactgtcagccctcactgtcagccccactgcacccccctgtgcctgctgggcactgggcactagctagatgctttaggttgcttcagctgatccttcaactctgtgaggtggataccaatattctattttgcagatagaatttggcccagagaggttaactaatatatccatgatcacacagctaataaaagtcagagctcaggaaaaaaaaaaaaaaaaaaaaaaaaaaaaaaaa

SEQ ID NO: 225 - protein, 572 aa, Homo sapiens
MEELEKELDVVDPDGSVPVGLRQRNQTEKQSTGVYNREAMLNFCEKETKKLMQREMSMDESKQVETKTDAKNGQERGRDASKKALGPRRNSDLGKEPKRGGLKKSFSRDRDEAGGKSGEKPKEEKIIRGIDKGRVRAAVDKKEAGKDGRGEERAVATKKEEEKKGGDRNTGLSRDKDKKREEMKEVAKKEDDEKVKGERRNTDTRKEGEKMKRAGGNTDMKKEDEKVKRGTGNTDTKKDDEKVKKNEPLHEKEAKDDSKTKTPEKQTPSGPTKPSEGPAKVEEEAAPSIFDEPLERVKNNDPEMTEVNVNNSDCITNEILVRFTEALEFNTVVKLFALANTRADDHVAFAIAIMLKANKTITSLNLDSNHITGKGILAIFRALLQNNTLTELRFHNQRHICGGKTEMEIAKLLKENTSLLKLGYHFELAGPRMTVTNLLSRNMDKQRQKRLQEQRQAQEAKGEKKDLLEVPKAGAVAKGSPKPSPQPSPKPSPKNSPKKGGAPAAPPPPPPPLAPPLIMENLKNSLSPATQRKMGDKVLPAQEKNSRDQLLAAIRSSNLKQLKKVEVPKLLQ

SEQ ID NO: 226 - DNA, 2529 bp, Homo sapiens
gctggagcatcccgctctggtgccgctgcagccggcagagatggttgagctcatgttcccgctgttgctcctccttctgcccttccttctgtatatggctgcgccccaaatcaggaaaatgctgtccagtggggtgtgtacatcaactgttcagcttcctgggaaagtagttgtggtcacaggagctaatacaggtatcgggaaggagacagccaaagagctggctcagagaggagctcgagtatatttagcttgccgggatgtggaaaagggggaattggtggccaaagagatccagaccacgacagggaaccagcaggtgttggtgcggaaactggacctgtctgatactaagtctattcgagcttttgctaagggcttcttagctgaggaaaagcacctccacgttttgatcaacaatgcaggagtgatgatgtgtccgtactcgaagacagcagatggctttgagatgcacataggagtcaaccacttgggtcacttcctcctaacccatctgctgctagagaaactaaaggaatcagccccatcaaggatagtaaatgtgtcttccctcgcacatcacctgggaaggatccacttccataacctgcagggcgagaaattctacaatgcaggcctggcctactgtcacagcaagctagccaacatcctcttcacccaggaactggcccggagactaaaaggctctggcgttacgacgtattctgtacaccctggcacagtccaatctgaactggttcggcactcatctttcatgagatggatgtggtggcttttctcctttttcatcaagactcctcagcagggagcccagaccagcctgcactgtgccttaacagaaggtcttgagattctaagtgggaatcatttcagtgactgtcatgtggcatgggtctctgcccaagctcgtaatgagactatagcaaggcggctgtgggacgtcagttgtgacctgctgggcctcccaatagactaacaggcagtgccagttggacccaagagaagactgcagcagactacacagtacttcttgtcaaaatgattctccttcaaggttttcaaaacctttagcacaaagagagcaaaaccttccagccttgcctgcttggtgtccagttaaaactcagtgtactgccagattcgtctaaatgtctgtcatgtccagatttactttgcttctgttactgccagagttactagagatatcataataggataagaagaccctcatatgacctgcacagctcattttccttctgaaagaaactactacctaggagaatctaagctatagcagggatgatttatgcaaatttgaactagcttctttgttcacaattcagttcctcccaaccaaccagtcttcacttcaagagggccacactgcaacctcagcttaacatgaataacaaagactggctcaggagcagggcttgcccaggcatggtggatcaccggaggtcagtagttcaagaccagcctggccaacatggtgaaaccccacctctactaaaaattgtgtatatctttgtgtgtcttcctgtttatgtgtgccaagggagtattttcacaaagttcaaaacagccacaataatcagagatggagcaaaccagtgccatccagtctttatgcaaatgaaatgctgcaaagggaagcagattctgtatatgttggtaactacccaccaagagcacatgggtagcagggaagaagtaaaaaaagagaaggagaatactggaagataatgcacaaaatgaagggactagttaaggattaactagccctttaaggattaactagttaaggattaatagcaaaagatattaaatatgctaacatagctatggaggaattgagggcaagcacccaggactgatgaggtcttaacaaaaaccagtgtggcaaaaaaaaaaaaaaaaaaaaatcctaaaaacaaacaaacaaaaaaaacaattcttcattcagaaaaattatcttagggactgatattggtaattatggtcaatttaataatattttggggcatttccttacattgtcttgacaagattaaaatgtctgtgccaaaattttgtattttatttggagacttcttatcaaaagtaatgctgccaaaggaagtctaaggaattagtagtgttcccatcacttgtttggagtgtgctattctaaaagattttgatttcctggaatgacaattatattttaactttggtgggggaaagagttataggaccacagtcttcacttctgatacttgtaaattaatcttttattgcacttgttttgaccattaagctatatgtttagaaatggtcattttacggaaaaattagaaaaattctgataatagtgcagaataaatgaattaatgttttacttaatttatattgaactgtcaatgacaaataaaaattctttttgattattttttgttttcatttaccagaataaaaactaagaattaaaagtttgattacagacaaaaaaaaaaaaaaaaaaaaaaa

SEQ ID NO: 227 - protein, 318 aa, Homo sapiens
MVELMFPLLLLLLPFLLYMAAPQIRKMLSSGVCTSTVQLPGKVVVVTGANTGIGKETAKELAQRGARVYLACRDVEKGELVAKEIQTTTGNQQVLVRKLDLSDTKSIRAFAKGFLAEEKHLHVLINNAGVMMCPYSKTADGFEMHIGVNHLGHFLLTHLLLEKLKESAPSRIVNVSSLAHHLGRIHFHNLQGEKFYNAGLAYCHSKLANILFTQELARRLKGSGVTTYSVHPGTVQSELVRHSSFMRWMWWLFSFFIKTPQQGAQTSLHCALTEGLEILSGNHFSDCHVAWVSAQARNETIARRLWDVSCDLLGLPID

SEQ ID NO: 228 - DNA, 1926 bp, Homo sapiens
gctggagcatcccgctctggtgccgctgcagccggcagagatggttgagctcatgttcccgctgttgctcctccttctgcccttccttctgtatatggctgcgccccaaatcaggaaaatgctgtccagtggggtgtgtacatcaactgttcagcttcctgggaaagtagttgtggtcacaggagctaatacaggtatcgggaaggagacagccaaagagctggctcagagaggagctcgagtatatttagcttgccgggatgtggaaaagggggaattggtggccaaagagatccagaccacgacagggaaccagcaggtgttggtgcggaaactggacctgtctgatactaagtctattcgagcttttgctaagggcttcttagctgaggaaaagcacctccacgttttgatcaacaatgcaggagtgatgatgtgtccgtactcgaagacagcagatggctttgagatgcacataggagtcaaccacttgggtcacttcctcctaacccatctgctgctagagaaactaaaggaatcagccccatcaaggatagtaaatgtgtcttccctcgcacatcacctgggaaggatccacttccataacctgcagggcgagaaattctacaatgcaggcctggcctactgtcacagcaagctagccaacatcctcttcacccaggaactggcccggagactaaaaggctctggcgttacgacgtattctgtacaccctggcacagtccaatctgaactggttcggcactcatctttcatgagatggatgtggtggcttttctcctttttcatcaagactcctcagcagggagcccagaccagcctgcactgtgccttaacagaaggtcttgagattctaagtgggaatcatttcagtgactgtcatgtggcatgggtctctgcccaagctcgtaatgagactatagcaaggcggctgtgggacgtcagttgtgacctgctgggcctcccaatagactaacaggcagtgcagttggacccaagagaagactgcagcagactacacagtacttcttgtcaaaatgattctccttcaaggttttcaaaacctttagcacaaagagagcaaaaccttccagccttgcctgcttggtgtccagttaaaactcagtgtactgccagattcgtctaaatgtctgtcatgtccagatttactttgcttctgttactgccagagttactagagatatcataataggataagaagaccctcatatgacctgcacagctcattttccttctgaaagaaactactacctaggagaatctaagctatagcagggatgatttatgcaaatttgaactagcttctttgttcacaattcagttcctcccaaccaaccagtcttcacttcaagagggccacactgcaacctcagcttaacatgaataacaaagactggctcaggagcagggcttgcccaggcatggtggatcaccggagtcagtagttcaagaccagcctggccaacatggtgaaaccccacctctactaaaaattgtgtatatctttgtgtgtcttcctgtttatgtgtgccaagggagtattttcacaaagttcaaaacagccacaataatcagagatggagcaaaccagtgccatccagtctttatgcaaatgaaatgctgcaaagggaagcagattctgtatatgttggtaactacccaccaagagcacatgggtagcagggaagaagtaaaaaaagagaaggagaatactggaagataatgcacaaaatgaagggactagttaaggattaactagccctttaaggattaactagttaaggattaatagcaaaagacattaaatatgctaacatagctatggaggaattgagggcaagcacccaggactgatgaggtcttaacaaaaaccagtgtggcaaa

SEQ ID NO: 229 - DNA, 2626 bp, Homo sapiens
cgcgcggcggcggcgggcgtgcgaggctgttgtgctcccggctctcgtgtttcccctcctgagcgggtggaggaggcccaagcggtgctgggcgcgctcccccttcctttccctccggcgtcctctcccggccctctcgcgctgcactgtctctccgacgcaagactgtcccggcccggatatggctcgtggacagcagaaaattcagtctcagcagaaaaatgccaaaaagcaagctggacaaaagaagaaacaaggacatgaccaaaaggctgctgccaaagctgccttaatatatacctgcactgtctgtaggacacaaatgccagaccctaagaccttcaagcagcactttgagagcaagcatcctaagactccacttcctccagaattagctgatgttcaggcataaggttgtttacaggtgaattcatgacacctttgactcttctactgtctcagaccttaggtaacatacctgcagctgcttttctaacaaactgttgatcagcaaaaataaaggggctacagaaacactcatttttatgctgttccctcttgggcttcatgcaaagacaattctgtgtaaatgtacagttgactctgatttggaaatatgaaaatcagtccatccttgttataaaaaatttttttacaattgtaattatattgatgttcatattgtgtaaaataactcatttaataaaatagtactttgatttacgacatcacaggataaatggttttagaaattctgttctaactttccacattatttgccttataaaaatctaatgaattcatcagctagaattgcaagtgcaattcttatatccctttctctgctcagtggcaggttcctcagttaaactagagcagactgattcattaaaattgtgcatacgattttatgggcagctgatgatctaggtgaaaaatgacttatctgctgccttagtatattgcggttatgtgtcattgtacccctctgatcatttcctgtgtttgagttggaatatttaaaattgcagtatgacctggctctaactgccagtcaggtgtaccctgtagataactgatagcttcctaaaagcggttggattgtcagtgagcccttgtgaaaggttaggttctaatgtatatgccgtaatgaaataatcattaagcctattgtttaatgcaaaatatggaacaaatgtgaactggtaaaggtcgatcttgatactatattctttgaaaattcttgaagttctttaatttgaaattgaaacattaatttttgaggtttttggaagttactatttggccatttttacaaatggattttgcattaacaggaagattggaatgacttgtggctggattaattcccagaaccctctccctcctttcttttctaagtgagttgttgattttaggagtttgctttgtgctgttacctaaaatcagagactggtgtacagtatgacttccatctgaacttgaaaagtattaaaatgggtcaatattcacattcttttagatctcaggatgggaaaatgggtttgttcagatgggatatgggtaaatcttacccaattaagggaagggctaattttaggatttcttctaatttgcttgtgtcaactcttaacttgttaaaactgctgtttaactcgggttttaaattttttaaattaatataataggaaaggaacactaaaatacttactggggtaactggcttagagccatttatctgatcctgtggattacagaatgcattccctcttctgctgtagcttatcattgctttgttttgtagctctgcatattttgcccaccttgtcttccctgtaagtttaagacgtttccaaggaaaagcttcagggctgatagtttcttagcaattcctattcttatgcccttactttaaaatagtccttttattctgtgtattttatttcctaagtttcagatgtaatatctgttgtttcctaacatgtcgattaccagaacgttagaattttacctaatttcttgtggatattgcagaagttctggttaaatcacaacttaaaagtttttaaaagtgctttgagcatatgtatatgtttagtgacaaatcatataaaaccattcacaagttggtttattatataacggaggtaaagggactaattcaggatgaaagtttttggtcctggtatttaacccttttttataagcagctgaagacaccatatttaacactatatctcagtgatagggaaatagctgcattgatcttacatgagcataatcatccttatacttcatgaggggattattagtacaatccccattttactgtgtttgagttaaaaaccaaacatccctgtaatttaatttgaagattctttaacagattgcagcaaagttcattataaaactgttatggtgtcttcaaagacttgataaaataacactgagagagaattggtccatttgtatgctgtatttctattacttgccaaaaggaatggggttaagattaaacttgtttccattctcttcacatggatatacatccccatgtttaactgacacactgggggctcagttgtgtgctgtaatgtcttattaaagaagatattaaagaaaaaaa

SEQ ID NO: 230 - protein, 76 aa, Homo sapiens
MARGQQKIQSQQKNAKKQAGQKKKQGHDQKAAAKAALIYTCTVCRTQMPDPKTFKQHFESKHPKTPLPPELADVQA

SEQ ID NO: 231 - DNA, 2989 bp, Homo sapiens
cccaccgactccactatgttgaagaaattcgacaagaaggatgaggagtcaggtggaggctccaacccattccagcaccttgagaagagtgcggtactccaggaggcccgtgtatttaatgaaactcccatcaaccctcggaaatgtgcccacatcctcaccaagattctttatctcataaaccagggggagcacctggggaccacggaagcgaccgaggccttctttgccatgaccaagctctttcagtccaatgatcccacactccgtcggatgtgctacttgaccatcaaggagatgtcttgcattgcagaggatgtcatcattgtcaccagcagcctaacaaaagacatgactgggaaagaagacaactaccggggcccggccgtgcgagccctctgccagatcactgatagcaccatgctgcaggctattgagcgctacatgaaacaagccattgtggacaaggtgcccagtgtctccagctctgccctcgtgtcttccttgcacctgctgaagtgcagctttgacgtggtcaagcgctgggtgaatgaggctcaggaggcagcatccagtgataacatcatggtccagtaccacgcactagggctcctgtaccatgtgcgtaagaatgaccgcctagccgtcaataagatgatcagcaaggtcacacggcatggccttaagtctccctttgcctactgcatgatgatccgggtggccagcaagcagctggaagaggaggatggcagccgtgacagcccactgtttgacttcatcgagagctgcttgcgcaacaagcacgagatggtggtgtatgaagccgcctcggccatcgtcaatctgccaggctgcagtgccaaagagctggccccggctgtgtcagtgctccagcttttctgcagctcacccaaggctgctctccgctatgctgctgttcgtaccctcaataaggttgccatgaagcatccgtcagctgtgacagcttgtaatctggatctggagaacctggtcacagattcaaaccgcagcattgccacgctggccatcaccaccctccttaagacgggcagcgagagcagcatcgaccgcctcatgaagcagatctcctccttcatgtcagaaatctcggatgaattcaaggtggtggttgtccaggccatcagtgccctgtgtcagaaatatcctcgcaaacacgccgtccttatgaacttcctgttcaccatgctgcgggaagagggtggctttgagtataagcgcgctatcgtggactgcatcatcagcatcattgaagagaactcagagagcaaggagacagggctgtcacatctgtgcgagttcatcgaggactgcgagttcacagtgctggccacccgtattctacatctcctgggccaggaggggcccaagaccaccaatccctcaaagtacatccgcttcatctataaccgagtggtcttggagcatgaggaggtccgggcaggtgctgtgagtgctctggcgaagtttggagcccagaatgaagagatgttacccagtatcttggtgttgctgaagaggtgtgtgatggatgatgacaatgaagtaagggaccgagccaccttctacctaaatgtcctggagcagaagcagaaggcccttaatgcaggctatatcctaaatggtctgactgtgtccatccctggtctggagagggctctgcagcagtacactctagaaccatcagaaaaaccttttgacctcaagtctgtgcccctggccacggcgcccatggcagagcagagaacagaaagtacccccatcacagcagtcaaacagcctgagaaagtggcagctaccaggcaggagatcttccaggagcagttggcagcagtgccagagttccgcggtcttgggcccctcttcaagtcctcgcctgagcccgtggccctcaccgagtcagagacggagtatgtcatccgctgcaccaaacacaccttcaccaaccacatggtttttcagtttgactgcacaaacacactcaatgaccagaccttggagaatgtcacagtgcagatggagcccactgaggcctatgaggtgctctgttacgtgcctgcccggagcctgccctacaaccagcccgggacctgctacacactggtggcactgcccaaagaagaccccacagctgtggcctgcacattcagctgcatgatgaagttcactgtcaaggactgtgatcccaccactggggagactgatgacgaaggctatgaggatgagtatgtgctggaagatctggaagttactgtagctgatcacattcaaaaggtcatgaaactgaacttcgaagcagcctgggatgaggtaggggatgaatttgagaaggaggaaacgttcaccttgtctaccatcaagacacttgaagaggctgtgggtaatattgtgaagttcttgggaatgcacccttgtgagaggtcagacaaagtgccggataacaagaacacccacacgttgctcctggctggtgtgttccggggtggtcatgacatcctggtgcgctcccggctgctgcttttggacacagtgacaatgcaggtgacagccagaagtttggaggagctgccagtagacatcatcttggcatctgtgggataagaggccagcctgcataggacctcatacccttccccaacactacctggaagttgtgccttcctcatgaaactggcagaaaccccttcccaagcttctgtattgaaaaacaattaggaatcattgcagatttttttttattctgctcccacctcccacccgggactacttgctggtgactttttttttttttttttttttaaataggggatgattttagcttgtcctaaatcttgctgtccacccttccaggaaagggacattgtaaatgaataaaacattctcaactcctcttgaatctatcccccaagaaaccatcttatccctgtaataaatcagcatgtatttattg

SEQ ID NO: 232 - protein, 874 aa, Homo sapiens
MLKKFDKKDEESGGGSNPFQHLEKSAVLQEARVFNETPINPRKCAHILTKILYLINQGEHLGTTEATEAFFAMTKLFQSNDPTLRRMCYLTIKEMSCIAEDVIIVTSSLTKDMTGKEDNYRGPAVRALCQITDSTMLQAIERYMKQAIVDKVPSVSSSALVSSLHLLKCSFDVVKRWVNEAQEAASSDNIMVQYHALGLLYHVRKNDRLAVNKMISKVTRHGLKSPFAYCMMIRVASKQLEEEDGSRDSPLFDFIESCLRNKHEMVVYEAASAIVNLPGCSAKELAPAVSVLQLFCSSPKAALRYAAVRTLNKVAMKHPSAVTACNLDLENLVTDSNRSIATLAITTLLKTGSESSIDRLMKQISSFMSEISDEFKVVVVQAISALCQKYPRKHAVLMNFLFTMLREEGGFEYKRAIVDCIISIIEENSESKETGLSHLCEFIEDCEFTVLATRILHLLGQEGPKTTNPSKYIRFIYNRVVLEHEEVRAGAVSALAKFGAQNEEMLPSILVLLKRCVMDDDNEVRDRATFYLNVLEQKQKALNAGYILNGLTVSIPGLERALQQYTLEPSEKPFDLKSVPLATAPMAEQRTESTPITAVKQPEKVAATRQEIFQEQLAAVPEFRGLGPLFKSSPEPVALTESETEYVIRCTKHTFTNHMVFQFDCTNTLNDQTLENVTVQMEPTEAYEVLCYVPARSLPYNQPGTCYTLVALPKEDPTAVACTFSCMMKFTVKDCDPTTGETDDEGYEDEYVLEDLEVTVADHIQKVMKLNFEAAWDEVGDEFEKEETFTLSTIKTLEEAVGNIVKFLGMHPCERSDKVPDNKNTHTLLLAGVFRGGHDILVRSRLLLLDTVTMQVTARSLEELPVDIILASVG

SEQ ID NO: 233 - DNA, 1798 bp, Homo sapiens
gccgcccggccgagcgcggagcgcagccactcgccgctgcccagggagcgcccaagatgtggggggaccggggcggcagcggccgtagcagcgccagggacgggggcacgcagcagcctccgctcgcccgcctgtcctgacctgcctcgcttgcccccaaagaatgtcagccaagtccaaggggaacccctcctcgtcctgtccagccgagggaccgccggcagcctccaaaaccaaggtgaaggaacagatcaagatcatcgtggaggatttggaattagtcctgggcgacctgaaggacgtggccaaggaacttaaggagatgaagtcccactctgttgcccaggctagagtgcaatggcacaatctgggctcactgcaacctctgcctcccaggttcaagctattctcctgcctcagcctgcctcagtgcgccactacgcctgggtggttgaccagattgacaccctgacctctgacctacagctggaggatgagatgactgacagctccaaaacggacacgctgaatagtagctcaagtggcacaacagcctccagcctagagaagatcaaagtgcaggctaatgcaccgcttattaaacccccagcacacccatctgctatcctcacggtcctgagaaagccaaaccctccaccacctcctccaaggttgacacctgtgaagtgtgaagaccccaaaagggtggttccaactgccaatcctgtaaaaaccaatggcacccttctacgaaatggaggcttaccaggtggacctaacaaaattccaaatggagatatctgctgcatacccaacagtaacttggacaaggctccagtccagcttctgatgcatagacctgaaaaagacagatgtccccaggcagggcctcgagaacgagttcggtttaatgaaaaagtacagtaccatggctattgtcctgactgtgatacccggtataacataaaaaacagggaggtccacttacacagtgaacctgtccacccaccgggaaagattcctcaccaaggccctcccctccctcctacaccccatctccctcctttcccactagaaaatgggggaatgggaataagccacagtaacagcttcccccctatcagacctgcaactgtgcctcctcccactgcaccaaaaccacagaagacgatcttgaggaagtcaaccactacaaccgtgtgatgtatgccattaaaaaaattgtttttttaattttctatattataaacataaaataagtaatgagcactttctactcaagcaataaaaagcccaaatatattaatcctgcattcagcaaagtggcataaaaatcacctggtaagtatgcagcacattgcttatatcctgggtatgcattattttaaatgttgtatcattaaaaacctcagaatgatgaaaaatatgaatgatgcattgtttttgcaattgacctatgacaaactgtgaacctgcagatttcacctattttgatttactataagagctgggatttgattcattttatttatgcctaagtcatctatgcattaacatgtcatattcttaactttgatctaatgctttttactaggaaattttaatactgaaggactattttattatttttttctaaagatgtttgtcactagtttttcattattaaatgctgaggccaataccaagaagtttattttctatattatacaattatgaattacatgctcagctatatatgtaataaaatactttggtctgtggaaaaaaaaaaaaaaaaaaaaaaaaaaaaaaaaaaaaa

SEQ ID NO: 234 - protein, 281 aa, Homo sapiens
MAQSGLTATSASQVQAILLPQPASVRHYAWVVDQIDTLTSDLQLEDEMTDSSKTDTLNSSSSGTTASSLEKIKVQANAPLIKPPAHPSAILTVLRKPNPPPPPPRLTPVKCEDPKRVVPTANPVKTNGTLLRNGGLPGGPNKIPNGDICCIPNSNLDKAPVQLLMHRPEKDRCPQAGPRERVRFNEKVQYHGYCPDCDTRYNIKNREVHLHSEPVHPPGKIPHQGPPLPPTPHLPPFPLENGGMGISHSNSFPPIRPATVPPPTAPKPQKTILRKSTTTTV

SEQ ID NO: 235 - DNA, 1282 bp, Homo sapiens
ctgcgatcccgcagggcagcgacgcgactctggtgcgggccgtcttcttccccccgagctgggcgtgcgcggccgcaatgaactgggagctgctgctgtggctgctggtgctgtgcgcgctgctcctgctcttggtgcagctgctgcgcttcctgagggctgacggcgacctgacgctactatgggccgagtggcagggacgacgcccagaatgggagctgactgatatggtggtgtgggtgactggagcctcgagtggaattggtgaggagctggcttaccagttgtctaaactaggagtttctcttgtgctgtcagccagaagagtgcatgagctggaaagggtgaaaagaagatgcctagagaatggcaatttaaaagaaaaagatatacttgttttgccccttgacctgaccgacactggttcccatgaagcggctaccaaagctgttctccaggagtttggtagaatcgacattctggtcaacaatggtggaatgtcccagcgttctctgtgcatggataccagcttggatgtctacagaaagctaatagagcttaactacttagggacggtgtccttgacaaaatgtgttctgcctcacatgatcgagaggaagcaaggaaagattgttactgtgaatagcatcctgggtatcatatctgtacctctttccattggatactgtgctagcaagcatgctctccggggtttttttaatggccttcgaacagaacttgccacatacccaggtataatagtttctaacatttgcccaggacctgtgcaatcaaatattgtggagaattccctagctggagaagtcacaaagactataggcaataatggagaccagtcccacaagatgacaaccagtcgttgtgtgcggctgatgttaatcagcatggccaatgatttgaaagaagtttggatctcagaacaacctttcttgttagtaacatatttgtggcaatacatgccaacctgggcctggtggataaccaacaagatggggaagaaaaggattgagaactttaagagtggtgtggatgcagactcttcttattttaaaatctttaagacaaaacatgactgaaaagagcacctgtacttttcaagccactggagggagaaatggaaaacatgaaaacagcaatcttcttatgcttctgaataatcaaagactaatttgtgattttactttttaatagatatgactttgcttccaacatggaatgaaataaaaaataaataataaaagattgccatgaatcttgcaaa

SEQ ID NO: 236 - protein, 339 aa, Homo sapiens
MNWELLLWLLVLCALLLLLVQLLRFLRADGDLTLLWAEWQGRRPEWELTDMVVWVTGASSGIGEELAYQLSKLGVSLVLSARRVHELERVKRRCLENGNLKEKDILVLPLDLTDTGSHEAATKAVLQEFGRIDILVNNGGMSQRSLCMDTSLDVYRKLIELNYLGTVSLTKCVLPHMIERKQGKIVTVNSILGIISVPLSIGYCASKHALRGFFNGLRTELATYPGIIVSNICPGPVQSNIVENSLAGEVTKTIGNNGDQSHKMTTSRCVRLMLISMANDLKEVWISEQPFLLVTYLWQYMPTWAWWITNKMGKKRIENFKSGVDADSSYFKIFKTKHD

SEQ ID NO: 237 - DNA, 2813 bp, Homo sapiens
  misc_feature 13, 981, 992, 2807: n = A,T,C or G
cctggagactcgngtggccgaggggcttcataccagctgaagagcgacaagccgctggcagccgcggatctcaccgccgctcaggagatctgttggtaatctgaggatttttattctacgtcgtcttgacagatggaaaacctgaagtaacttcgggctaaccttgtgtttttggaaaattagtagacttggtggtgaagaaactgggaggagtaggatattagctaactttgcatagccacatatagagcgtcgcagctgcattccaccaaagaggaaccaaaaggcctgtggtgttcccagggtacatattcatgccagaagtgaagtgccttggtgaattcgtttcctgaaagtttatcgcatacttgtactgggttagccttatgccagcctggaccatcttggaggcagtgtaggatcatggaagaactttgaattaggtttttagaacttcagccataaaaatgggcagaattttccttgatcatatcggtggtacccgtctgttttcttgtgcaaactgtgatacgatcctgaccaaccgctcagaactcatctccactcgtttcacaggcgccactggcagagcatttctttttaacaaggtagttaacctgcagtacagtgaagttcaagatcgggtcatgctcactggccgccacatggttcgagatgtgagctgcaaaaactgcaatagcaaactgggatggatctatgagtttgccactgaagacagccagcgatataaggaaggccgcgtgatcctggaacgtgctctagttcgagagagtgagggctttgaggagcatgtaccatctgataactcttgaagatacagagagaaatccatcttttcccaggtctccttcactgaaaacaaaaatctacttacatacactgtcaccttagcatcagagtcggattaatgaactgcggaacaagaggttgtgagaatctaagatggaacctttctttctntctttcttttnttttaaattttgtattttccatccaacagcagtgtgtagagagaatattatgcagatgccgttaattttttaccctatgtttacgtcttgaggcagcagagtctgtctgcagctatgtggtgagctatgtaaggaaaaaaatctgggctgttagagtgaaaaagtgtgttttatgtcaattgtgaaaggaaaatgttaggagtatggtttttaaacttgggcttcattttaaacttttttttttaaacccagttatttcacttgatttgctagcttcagagaagagatccgaatctgtgcccagcgctaaaggctcagtgttagcatggcttgtgctggccggtgtgccatattcttgttggagatgaaccgtagcaccagagcccattcttccttgtcagtcttggcccaaagatgtcaccattcctagttatttgtcaccacataattggtgttgattggaaactttttctgagatgggacagaactgctgggttgtctttttccatgtaacttaagcatagtaatataaataaagtaatagttggatgcttttggtcctgtgttgcttttaaaaacaccttataaaagaggagagtatttgataagcaattttcatagtagtaaagttttttttcatctcttaaactaaattgaccatgcatataatattctttgtttaaatgaaagcatactgttgaaacccgcagtgttgcatttagaaaacagttgaacagaatgtcaatgtgcattcatgcaaaaaaacatttaatctgcatctgttttagaaaagggggaaatgaagcaacttgtctaaaaatactgctttacaaagcatttcagcctttccccctcagttttgcattgattttttgacaagtctgtagagcctaatagtttccatcaaaggcctagatctcttatttagcatttttttcagctcttctctcagaagttcagctgttgaaacgaaaactgtactttgtaccctcacatacaaagggatcaaatttgacctggtgttattttagccccaaatttatgacattacacaatattaaaatgtaaatgtttctttacccaaactacttctagatattctagtatttgcttctggtggaattaaatgacggtaaaattggctaattatttgaatgaatgaatggatggatgttttgcatgctcaatttctaggtcctttgtctagaaaggaaatttgcctcagttgaattagtgaaatatttctgtcgttgatattaaaagtgacttctgagtacagttaagttcctcctatttgccactgggctgttggttagaagcataggtaactgattaagtaggtatgatactgcatttgaaataagtggacacaaactatcctttctccaccatggactcaatctgagaacaacagcattcatttccattcatttccatactggcttttgattatatgcagattcctagtagcatgccttacctacagcactatgtgcatttgctgtcacaataaagtatattttgtcttgcattgatgcagtactgctgcttattttccactgatcttgtctagtgatcatcttaatttttatctctgaacacatacttggtatctttgagtacctgtagctttcttcatttggcaatgatagtgatgtctgacttgattaactgcctaattcacacatgaagacattgactttgccagtattaacttctctgagatcattttgccttagatactgataactatagttcagtatatataaacaaaaaaatttcatattactaggttaacttttaggtaactggcangtacca

SEQ ID NO: 238 - protein, 121 aa, Homo sapiens
MGRIFLDHIGGTRLFSCANCDTILTNRSELISTRFTGATGRAFLFNKVVNLQYSEVQDRVMLTGRHMVRDVSCKNCNSKLGWIYEFATEDSQRYKEGRVILERALVRESEGFEEHVPSDNS

SEQ ID NO: 239 - DNA, 2953 bp, Homo sapiens
ccctgagccttcccgtccgcctcgccacgcgcccggacggcctggggttgctgcccgtcagtctcgaaaggtgtttttggggaaaaaaatcacaatctggacgtgagaaaggacatgaggagactaaagacctgggattttgtcaatcagaatgaaaccaatgttgaaagacttttcaaatctattgttggtggtactctgtgactatgttcttggagaagctgaatatcttctcttgagagagccaggccatgtagcactaagcaacgacacagtgtatgtggatttccagtattttgatggtgctaatgggacactgaggaatgtatctgtcctgctgttggaggccaacaccaatcagactgtaactaccaagtacctcctgaccaaccagtcccagggaacactaaagtttgagtgcttctatttcaaggaggctggtgactactggttcacaatgactccagaagcaacagacaacagcactccattcccctggtgggagaaaagtgcctttctgaaggtggaatggcctgtctttcacgttgacttgaataggagtgccaaggcagcagaaggcaccttccaagtgggcctatttaccagtcaaccactgtgcccgtttcctgtggacaagcccaacattgtagtggatgtcatcttcaccaacagtcttcctgaggcaagaagaaattcaagacagccgctggaaataagaaccagcaaaaggacagaacttgctcaaggtcagtgggttgagtttggctgtgcacccttggggccagaagcctatgtcaccgtggtgctgaagctgcttgggcgagactcagtcattacctccacaggacccattgacctggcccagaaatttggatacaaactggtgatggtgccagaactcacatgtgagtccggggtagaggtgacagtgctgcctccaccatgcaccttcgtccaaggagtggtcactgtcttcaaggaggcccccagataccctgggaagaggaccattcacttggctgaaaacagcctgcccctgggagagaggaggacaatttttaactgtactttgtttgacatggggaagaataagtactgctttgactttggcatttcaagcagaagccatttttctgcaaaggaggagtgcatgctaattcagagaaatacagaaacttggggactgtggcagccatggagccagtgtagtgccacatgtggggatggtgtcagagagcgtcgccgagtgtgtctcacttccttcccctccagtcctgtctgccctggaatgtccttggaggcctccctgtgttccctggaggagtgtgctgctttccagccatccagcccatctcctcttcagccccagggtccagtgaagtccaacaacatcgtgactgtcactggtatatccttgtgcttgttcatcatcattgccactgtgctcatcacgctgtggaggaggttcggccggccagccaagtgcagcacacctgctcgacacaactccatccactcccccagcttccggaagaactcggacgaggagaatatctgcgagctgagcgagcagcgcgggagcttctcggatgggggagacgggcccacggggagtccaggggacacaggcatccctctgacctacaggcggagcgggccggtacctcccgaggatgatgcctctggcagcgagagcttccagtccaacgcccagaagataatcccacctctgttcagctaccgccttgcccagcagcagttaaaggagatgaaaaagaaaggtctgacggaaactaccaaagtgtatcacgtgtctcagagtcccctgacagacactgccattgatgcggcccccagcgctcccttagatttggaaagcccggaagaagctgcagcaaacaagttccggatcaaatccccatttccggagcagcccgcggtcagtgccggggaaaggcctccctccaggctggatctaaatgtgactcaggccagttgtgccataagccccagccagactctgatccgcaagtcacaggcaaggcacgtgggcagcagagggggcccgtccgaaaggagccatgccaggaacgcccatttcaggaggacagcgagtttccatgaagccaggcaggcccggccgttccgagagaggagcatgtccactctgactccacggcaggcccctgcctacagctctaggacgcggacctgcgagcaggcagaggacagatttaggcctcagagtcgaggtgcccacctgtttcctgaaaaactggagcatttccaagaggcaagtggaacccgtggtccattaaaccctctccctaaatcctacactttggggcagcccttgaggaaaccagaccttggggatcaccaggcaggattagtggccggaattgagagaacagagccccacagagctcgtcggggaccgtcccccagtcacaagagtgtctcaaggaagcagtcttctcccatatcccccaaagataactaccagagggtcagttctctgagcccttctcagtgtagaaaagacaagtgtcaaagcttccccactcaccctgagtttgccttctatgacaatacgtcgtttggcctcactgaggctgagcagaggatgctggacctcccaggatattttgggtcaaatgaagaggatgaaaccacaagtacacttagcgtggagaagctggtgatctagactgagaatcagcctgagctttacacagctggggtctgctactcgcgttttgtagacttttgtgtaactatttgtaccgtaggacagaatgtgaggaggaagtaacacacagaggaggatgtgtgtgtatgcatgtgtttgaattcacaaggaagaaattatttatcttgagctttttcctttgttattcaatttctattgatttattagtaataacaatggataataaaatgtaaatgagtg

SEQ ID NO: 240 - protein, 852 aa, Homo sapiens
MKPMLKDFSNLLLVVLCDYVLGEAEYLLLREPGHVALSNDTVYVDFQYFDGANGTLRNVSVLLLEANTNQTVTTKYLLTNQSQGTLKFECFYFKEAGDYWFTMTPEATDNSTPFPWWEKSAFLKVEWPVFHVDLNRSAKAAEGTFQVGLFTSQPLCPFPVDKPNIVVDVIFTNSLPEARRNSRQPLEIRTSKRTELAQGQWVEFGCAPLGPEAYVTVVLKLLGRDSVITSTGPIDLAQKFGYKLVMVPELTCESGVEVTVLPPPCTFVQGVVTVFKEAPRYPGKRTIHLAENSLPLGERRTIFNCTLFDMGKNKYCFDFGISSRSHFSAKEECMLIQRNTETWGLWQPWSQCSATCGDGVRERRRVCLTSFPSSPVCPGMSLEASLCSLEECAAFQPSSPSPLQPQGPVKSNNIVTVTGISLCLFIIIATVLITLWRRFGRPAKCSTPARHNSIHSPSFRKNSDEENICELSEQRGSFSDGGDGPTGSPGDTGIPLTYRRSGPVPPEDDASGSESFQSNAQKIIPPLFSYRLAQQQLKEMKKKGLTETTKVYHVSQSPLTDTAIDAAPSAPLDLESPEEAAANKFRIKSPFPEQPAVSAGERPPSRLDLNVTQASCAISPSQTLIRKSQARHVGSRGGPSERSHARNAHFRRTASFHEARQARPFRERSMSTLTPRQAPAYSSRTRTCEQAEDRFRPQSRGAHLFPEKLEHFQEASGTRGPLNPLPKSYTLGQPLRKPDLGDHQAGLVAGIERTEPHRARRGPSPSHKSVSRKQSSPISPKDNYQRVSSLSPSQCRKDKCQSFPTHPEFAFYDNTSFGLTEAEQRMLDLPGYFGSNEEDETTSTLSVEKLVI

SEQ ID NO: 241 - DNA, 3380 bp, Homo sapiens
gcacaccatggtgcacttctgtggcctactcaccctccaccgggagccagtgccgctgaagagtatctctgtgagcgtgaacatttacgagtttgtggctggtgtgtctgcaactttgaactacgagaatgaggagaaagttcctttggaggccttctttgtgttccccatggatgaagactctgctgtttacagctttgaggccttggtggatgggaagaaaattgtagcagaattacaagacaagatgaaggcccgcaccaactatgagaaagccatctcccagggccaccaggccttcttattggagggggacagcagctccagggatgtcttctcttgcaatgtgggtaacctccaacctgggtcgaaggcggcagtcaccctgaagtatgtgcaggagctgcctctggaagcagatggggctctgcgctttgtgctcccagctgtcctgaatcctagataccagttctctgggtcgtctaaggacagttgccttaatgtgaagactcctatagtccctgtggaggacctgccctacacactcagcatggtcgccaccatagattcccagcatggcattgagaaggtccaatccaactgccccttgagtcctaccgagtacctaggagaggacaagacttctgctcaggtttccctggctgctggacacaagtttgatcgggacgtggaactcctgatttactacaatgaggtgcatacccccagcgtggttttggagatggggatgcctaacatgaagccaggtcatttgatgggagatccatctgcaatggtgagtttctatccaaatatcccagaagatcaaccatcaaatacctgtggagagtttatctttctcatggaccgctcgggaagtatgcagagccccatgagtagccaggatacatctcgctgcgaatacaggcagccaaggaaacactgattttgctgctgaagagtttacctataggctgttatttcaacatctatggatttggctcttcctatgaggcatgctttccggagagtgtgaagtacactcagcaaacaatggaggaggctctggggagagtgaagcttatgcaggccgacctagggggcactgaaatcttggcaccactccagaacatttacaggggaccctccatcccaggccaccccctacagctttttgtctttacagatggagaagttacagacacgtttagtgtaattaaagaagttaggatcaacagacagaaacacaggtgtttctcatttggtattggagaaggcacctccaccagcctaataaaaggtattgcccgggcatcagggggcacctcagaatttatcacaggcaaagacaggatgcagtccaaggctctcaggactctgaaacgctctctgcagcctgtggtagaggatgtctctctgagctggcatttgcctcctggtctgtctgctaaaatgctttccccagaacagactgtcatctttaggggtcagagattaatcagctatgcccagctgaccgggaggatgccagcagcagagacaacaggagaagtatgcctcaaatatacactccagggcaagacttttgaggataaggtgacatttcctctacaacccaagcctgatgtcaacctcaccattcaccgccttgctgccaagtccttgctccagaccaaggacatgggcctcagggagactccagcaagtgataaaaaagatgcattgaaccttagccttgagtctggtgtcataagctccttcacagctttcattgctatcaataaggagctcaacaagccggttcaggggcctctggctcatagggacgtcccaaggccaattctgttgggtgcttctgccccattgaagataaaatgccaatcaggttttcgaaaggccttacactctgaccgtcctccttctgcatctcagcccagaggggaacttatgtgttataaggccaagacattccagatggacgattacagtctctgtgggttgataagtcacaaggaccagcacagtccaggctttggagagaatcaccttgtgcagctgatttaccaccaaaatgcaaatggttcctgggatctgaatgaagatctagccaagatcctaggtatgagtttggaagaaataatggctgcacagcctgccgagcttgtggattcctcaggctgggccaccatcctggccgtgatctggctgcacagcaatggtaaggacttgaagtgtgaatgggagcttctggaaaggaaggccgtggcctggatgcgtgcccatgcaggctccaccatgccttcggttgtgaaagctgctattactttcctgaagtcatctgtggatcctgctatctttgccttttgaagataccatccagaaaaagaagtgcctttaatttgctactgtcatttcctctagtatcacttttgctgtgatgatgtgttcttgtgtattataactctttattttttgccataaaagtaaaggatgcttactccacttcgcttctctgctccaggttcactttggatatgatctttcttttcccaacatatgccctcagaaaagtgacagtggtcccagaacctattccctttcttgagggagttcaaaacattcataggcagtaatgttcctcccagggtttccagggaaacaacatgaaaaacaggtgacatgaactacagactaaagattgcagcatttatgttagagaatgcttgaattagagaattttctgcattatctttgtctgttcactttctatcttatatacttatcagggccatactggtaagcttgcgtaggaggagttagagggaagttgaaagccaacatctggatcaatgtaatgtcaagatcacaaagacagagactgcaggggtccactgtgagaggtgacactgttggggaccttcctgattcattcttcttgggctttgctagcctgtacaacctacatgtcttttcttccactgcctgaaagacttgggttgaactataactgttggagagagatgttcctctttaatcatgaaacaccttaagaagtctataatgcaatccttagtcctaccctgaacctatgtgtcctctaagtcaggccctgatctagtgcagtaaagggaagggtgggcttaatgggagctttgcctgggacctgaacctggagcacttaccgcattaggaagaaaggagctccccgtaatcgttcctgacccttgtgtctcatataccctatcctggtggaaatgaccctatttgatatgctgtcccttaaaataacttgtatcaatattaaaatgactatttctaccctttaaaaaaaaaaaaaaaaaaaaaaaaaaaaaaaaaaaaaaaaaaaaaaaaaaaaaaaa

SEQ ID NO: 242 - protein, 437 aa, Homo sapiens
MEEALGRVKLMQADLGGTEILAPLQNIYRGPSIPGHPLQLFVFTDGEVTDTFSVIKEVRINRQKHRCFSFGIGEGTSTSLIKGIARASGGTSEFITGKDRMQSKALRTLKRSLQPVVEDVSLSWHLPPGLSAKMLSPEQTVIFRGQRLISYAQLTGRMPAAETTGEVCLKYTLQGKTFEDKVTFPLQPKPDVNLTIHRLAAKSLLQTKDMGLRETPASDKKDALNLSLESGVISSFTAFIAINKELNKPVQGPLAHRDVPRPILLGASAPLKIKCQSGFRKALHSDRPPSASQPRGELMCYKAKTFQMDDYSLCGLISHKDQHSPGFGENHLVQLIYHQNANGSWDLNEDLAKILGMSLEEIMAAQPAELVDSSGWATILAVIWLHSNGKDLKCEWELLERKAVAWMRAHAGSTMPSVVKAAITFLKSSVDPAIFAF

SEQ ID NO: 243 - DNA, 1225 bp, Homo sapiens
gcgccgtaaatagagtccaagtgggcggagagccgtcccgcgccgcccgctcatgtctctacagagccgactgtccggccgcctggcacagctgcgcgcggcggggcagctgctcgtccccccgcgcccccggcccggacacttggcgggtgccacgaggacccgcagcagcacgtgcggtcccccggcgttcctgggcgtgttcggccgccgtgcgcggacctcggcgggagttggggcgtggggggcggcggcggtggggcggacagccggggtgcgcacttgggcccccctggccatggcggcgaaggtggacctgagcacctccaccgactggaaggaggcgaaatcctttctgaagggcctgagtgacaagcagcgggaggaacattacttctgcaaggactttgtcaggctgaagaagatcccgacatggaaggagatggcgaaaggggtggctgtgaaggtggaggagcccaggtataaaaaggacaagcagctcaatgagaaaatctccctgctccgcagcgacatcaccaagctggaggtggacgccatcgtcaacgccgccaacagctccctgctcggaggcggtggcgtggacggctgcattcatcgggccgccggccccctgcttaccgacgagtgccggaccctgcagagctgtaagactggcaaggccaagatcaccggcggctatcggctcccggccaagtacgtcatccacacagtggggcccatcgcctacggggagcccagcgccagccaggctgccgagctccgcagctgctacctgagcagtctggacctgctgctggagcaccggctccgctcggtggcgttcccctgcatctccaccggcgtgtttggctacccctgtgaggcggccgccgagatcgtgctggccacgctgcgagagtggctggagcagcacaaggacaaggtggaccggctgatcatctgcgtgttcctcgagaaggacgaggacatctaccggagccggctcccccactacttccccgtggcctgaggctcccgcagcccaccctgaccgggactgacccgccttcgggaccccgctcccagctctgagaggtcgccaaagcctgcagcctggcctgggcctggccaccccttctttccctccgcgccccgcccccgaggagcctaataaagatctcgttgtggcaaaaaaaaaaaaaaaaaaaaaaaaaaaaaaaaaaaa

SEQ ID NO: 244 - protein, 325 aa, Homo sapiens
MSLQSRLSGRLAQLRAAGQLLVPPRPRPGHLAGATRTRSSTCGPPAFLGVFGRRARTSAGVGAWGAAAVGRTAGVRTWAPLAMAAKVDLSTSTDWKEAKSFLKGLSDKQREEHYFCKDFVRLKKIPTWKEMAKGVAVKVEEPRYKKDKQLNEKISLLRSDITKLEVDAIVNAANSSLLGGGGVDGCIHRAAGPLLTDECRTLQSCKTGKAKITGGYRLPAKYVIHTVGPIAYGEPSASQAAELRSCYLSSLDLLLEHRLRSVAFPCISTGVFGYPCEAAAEIVLATLREWLEQHKDKVDRLIICVFLEKDEDIYRSRLPHYFPVA

SEQ ID NO: 245 - DNA, 2402 bp, Homo sapiens
agtctccgccgccgccgtgaacatggagcccccggacgcaccggcccaggcgcgcggggccccgcggctgctgttgctcgcagtcctgctggcggcgcacccagatgcccaggcggaggtgcgcttgtctgtacccccgctggtggaggtgatgcgaggaaagtctgtcattctggactgcacccctacgggaacccacgaccattatatgctggaatggttccttaccgaccgctcgggagctcgcccccgcctagcctcggctgagatgcagggctctgagctccaggtcacaatgcacgacacccggggccgcagtcccccataccagctggactcccaggggcgcctggtgctggctgaggcccaggtgggcgacgagcgagactacgtgtgcgtggtgagggcaggggcggcaggcactgctgaggccactgcgcggctcaacgtgtttgcaaagccagaggccactgaggtctcccccaacaaagggacactgtctgtgatggaggactctgcccaggagatcgccacctgcaacagccggaacgggaacccggcccccaagatcacgtggtatcgcaacgggcagcgcctggaggtgcccgtagagatgaacccagagggctacatgaccagccgcacggtccgggaggcctcgggcctgctctccctcaccagcaccctctacctgcggctccgcaaggatgaccgagacgccagcttccactgcgccgcccactacagcctgcccgagggccgccacggccgcctggacagccccaccttccacctcaccctgcactatcccacggagcacgtgcagttctgggtgggcagcccgtccaccccagcaggctgggtacgcgagggtgacactgtccagctgctctgccggggggacggcagccccagcccggagtatacgcttttccgccttcaggatgagcaggaggaagtgctgaatgtgaatctcgaggggaacttgaccctggagggagtgacccggggccagagcgggacctatggctgcagagtggaggattacgacgcggcagatgacgtgcagctctccaagacgctggagctgcgcgtggcctatctggaccccctggagctcagcgaggggaaggtgctttccttacctctaaacagcagtgcagtcgtgaactgctccgtgcacggcctgcccacccctgccctacgctggaccaaggactccactcccctgggcgatggccccatgctgtcgctcagttctatcaccttcgattccaatggcacctacgtatgtgaggcctccctgcccacagtcccggtcctcagccgcacccagaacttcacgctgctggtccaaggctcgccagagctaaagacagcggaaatagagcccaaggcagatggcagctggagggaaggagacgaagtcacactcatctgctctgcccgcggccatccagaccccaaactcagctggagccaattggggggcagccccgcagagccaatccccggacggcagggttgggtgagcagctctctgaccctgaaagtgaccagcgccctgagccgcgatggcatctcctgtgaagcctccaacccccacgggaacaagcgccatgtcttccacttcggcgccgtgagcccccagacctcccaggctggagtggccgtcatggccgtggccgtcagcgtgggcctcctgctcctcgtcgttgctgtcttctactgcgtgagacgcaaagggggcccctgctgccgccagcggcgggagaagggggctccgccgccaggggagccagggctgagccactcggggtcggagcaaccagagcagaccggccttctcatgggaggtgcctccggaggagccaggggtggcagcgggggcttcggagacgagtgctgagccaagaacctcctagaggctgtccctggacctggagctgcaggcatcagagaaccagccctgctcacgccatgcccgcccccgccttccctcttccctcttccctctccctgcccagccctcccttccttcctctgccggcaaggcagggacccacagtggctgcctgcctccgggagggaaggagagggagggtgggtgggtgggagggggccttcctccagggaatgtgactctcccaggccccagaatagctcctggacccaagcccaaggcccagcctgggacaaggctccgagggtcggctggccggagctatttttacctcccgcctcccctgctggtccccccacctgacgtcttgctgcagagtctgacactggattcccccccctcaccccgcccctggtcccactcctgcccccgccctacctccgccccaccccatcatctgtggacactggagtctggaataaatgctgtttgtcacatc

SEQ ID NO: 246 - protein, 628 aa, Homo sapiens
MEPPDAPAQARGAPRLLLLAVLLAAHPDAQAEVRLSVPPLVEVMRGKSVILDCTPTGTHDHYMLEWFLTDRSGARPRLASAEMQGSELQVTMHDTRGRSPPYQLDSQGRLVLAEAQVGDERDYVCVVRAGAAGTAEATARLNVFAKPEATEVSPNKGTLSVMEDSAQEIATCNSRNGNPAPKITWYRNGQRLEVPVEMNPEGYMTSRTVREASGLLSLTSTLYLRLRKDDRDASFHCAAHYSLPEGRHGRLDSPTFHLTLHYPTEHVQFWVGSPSTPAGWVREGDTVQLLCRGDGSPSPEYTLFRLQDEQEEVLNVNLEGNLTLEGVTRGQSGTYGCRVEDYDAADDVQLSKTLELRVAYLDPLELSEGKVLSLPLNSSAVVNCSVHGLPTPALRWTKDSTPLGDGPMLSLSSITFDSNGTYVCEASLPTVPVLSRTQNFTLLVQGSPELKTAEIEPKADGSWREGDEVTLICSARGHPDPKLSWSQLGGSPAEPIPGRQGWVSSSLTLKVTSALSRDGISCEASNPHGNKRHVFHFGAVSPQTSQAGVAVMAVAVSVGLLLLVVAVFYCVRRKGGPCCRQRREKGAPPPGEPGLSHSGSEQPEQTGLLMGGASGGARGGSGGFGDEC

SEQ ID NO: 247 - DNA, 4579 bp, Homo sapiens
ggactcaggaagagatagacccataatgatgctgcctcaaaactcgtggcatattgattttggaagatgctgctgtcatcagaaccttttctctgctgtggtaacttgcatcctgctcctgaattcctgctttctcatcagcagttttaatggaacagatttggagttgaggctggtcaatggagacggtccctgctctgggacagtggaggtgaaattccagggacagtgggggactgtgtgtgatgatgggtggaacactactgcctcaactgtcgtgtgcaaacagcttggatgtccattttccttcgccatgtttcgttttggacaagccgtgactagacatggaaaaatttggcttgatgatgtttcctgttatggaaatgagtcagctctctgggaatgtcaacaccgggaatggggaagccataactgttatcatggagaagatgttggtgtgaactgttacggtgaagccaatctgggtttgaggctagtggatggaaacaactcctgttcagggagagtggaggtgaaattccaagaaaggtggggaactatatgtgatgatgggtggaacttgaatactgctgccgtggtgtgcaggcaactaggatgtccatcttcttttatttcttctggagttgttaatagccctgctgtattgcgccccatttggctggatgacattttatgccaggggaatgagttggcactctggaattgcagacatcgtggatggggaaatcatgactgcagtcacaatgaggatgtcacattaacttgttatgatagtagtgatcttgaactaaggcttgtaggtggaactaaccgctgtatggggagagtagagctgaaaatccaaggaaggtgggggaccgtatgccaccataagtggaacaatgctgcagctgatgtcgtatgcaagcagttgggatgtggaaccgcacttcacttcgctggcttgcctcatttgcagtcagggtctgatgttgtatggcttgatggtgtctcctgctccggtaatgaatcttttctttgggactgcagacattccggaaccgtcaattttgactgtcttcatcaaaacgatgtgtctgtgatctgctcagatggagcagatttggaactgcgactagcagatggaagtaacaattgttcagggagagtagaggtgagaattcatgaacagtggtggacaatatgtgaccagaactggaagaatgaacaagcccttgtggtttgtaagcagctaggatgtccgttcagcgtctttggcagtcgtcgtgctaaacctagtaatgaagctagagacatttggataaacagcatatcttgcactgggaatgagtcagctctctgggactgcacatatgatggaaaagcaaagcgaacatgcttccgaagatcagatgctggagtaatttgttctgataaggcagatctggacctaaggcttgtcggggctcatagcccctgttatgggagattggaggtgaaataccaaggagagtgggggactgtgtgtcatgacagatggagcacaaggaatgcagctgttgtgtgtaaacaattgggatgtggaaagcctatgcatgtgtttggtatgacctattttaaagaagcatcaggacctatttggctggatgacgtttcttgcattggaaatgagtcaaatatctgggactgtgaacacagtggatggggaaagcataattgtgtacacagagaggatgtgattgtaacctgctcaggtgatgcaacatggggcctgaggctggtgggcggcagcaaccgctgctcgggaagactggaggtgtactttcaaggacggtggggcacagtgtgtgatgacggctggaacagtaaagctgcagctgtggtgtgtagccagctggactgcccatcttctatcattggcatgggtctgggaaacgcttctacaggatatggaaaaatttggctcgatgatgtttcctgtgatggagatgagtcagatctctggtcatgcaggaacagtgggtggggaaataatgactgcagtcacagtgaagatgttggagtgatctgttctgatgcatcggatatggagctgaggcttgtgggtggaagcagcaggtgtgctggaaaagttgaggtgaatgtccagggtgccgtgggaattctgtgtgctaatggctggggaatgaacattgctgaagttgtttgcaggcaacttgaatgtgggtctgcaatcagggtctccagagagcctcatttcacagaaagaacattacacatcttaatgtcgaattctggctgcactggaggggaagcctctctctgggattgtatacgatgggagtggaaacagactgcgtgtcatttaaatatggaagcaagtttgatctgctcagcccacaggcagcccaggctggttggagctgatatgccctgctctggacgtgttgaagtgaaacatgcagacacatggcgctctgtctgtgattctgatttctctcttcatgctgccaatgtgctgtgcagagaattaaactgtggagatgccatatctctttctgtgggagatcactttggaaaagggaatggtctaacttgggccgaaaagttccagtgtgaagggagtgaaactcaccttgcattatgccccattgttcaacatccggaagacacttgtatccacagcagagaagttggagttgtctgttcccgatatacagatgtccgacttgtgaatggcaaatcccagtgtgacgggcaagtggagatcaacgtgcttggacactggggctcactgtgtgacacccactgggacccagaagatgcccgtgttctatgcagacagctcagctgtgggactgctctctcaaccacaggaggaaaatatattggagaaagaagtgttcgtgtgtggggacacaggtttcattgcttagggaatgagtcacttctggataactgtcaaatgacagttcttggagcacctccctgtatccatggaaatactgtctctgtgatctgcacaggaagcctgacccagccactgtttccatgcctcgcaaatgtatctgacccatatttgtctgcagttccagagggcagtgctttgatctgcttagaggacaaacggctccgcctagtggatggggacagccgctgtgccgggagagtagagatctatcacgacggcttctggggcaccatctgtgatgacggctgggacctgagcgatgcccacgtggtgtgtcaaaagctgggctgtggagtggccttcaatgccacggtctctgctcactttggggaggggtcagggcccatctggctggatgacctgaactgcacaggaatggagtcccacttgtggcagtgcccttcccgcggctgggggcagcacgactgcaggcacaaggaggacgcaggggtcatctgctcagaattcacagccttgaggctctacagtgaaactgaaacagagagctgtgctgggagattggaagtcttctataacgggacctggggcagcgtcggcaggaggaacatcaccacagccatagcaggcattgtgtgcaggcagctgggctgtggggagaatggagttgtcagcctcgcccctttatctaagacaggctctggtttcatgtgggtggatgacattcagtgtcctaaaacgcatatctccatatggcagtgcctgtctgccccatgggagcgaagaatctccagcacagcagaagagacctggatcacatgtgaagatagaataagagtgcgtggaggagacaccgagtgctctgggagagtggagatctggcacgcaggctcctggggcacagtgtgtgatgactcctgggacctggccgaggcggaagtggtgtgtcagcagctgggctgtggctctgctctggctgccctgagggacgcttcgtttggccagggaactggaaccatctggttggatgacatgcggtgcaaaggaaatgagtcatttctatgggactgtcacgccaaaccctggggacagagtgactgtggacacaaggaagatgctggcgtgaggtgctctggacagtcgctgaaatcactgaatgcctcctcaggtcgtttagcacttattttatccagtatctttgggctccttctcccggttctgtttattctatttctcacgtggtgccgagttcagaaacaaaaacatctgcccctcagagtttcaaccagaaggaggggttctctcgaggagaatttattccatgagatggagacctgcctcaagagagaggacccacatgggacaagaacctcagatgacacccccaaccatggttgtgaagatgctagcgacacatcgctgttgggagttcttcctgcctctgaagccacaaaatgactttagacttccagggctcaccagatcaacctctaaatatctttgaaggagacaacaacttttaaatgaataaagaggaagtcaagttgccctatggaaaacttgtccaaataacatttcttgaacaataggagaacagctaaattgataaagactggtgataataaaaattgaattatgtatatcactgtt

SEQ ID NO: 248 - protein, 1453 aa, Homo sapiens
MMLPQNSWHIDFGRCCCHQNLFSAVVTCILLLNSCFLISSFNGTDLELRLVNGDGPCSGTVEVKFQGQWGTVCDDGWNTTASTVVCKQLGCPFSFAMFRFGQAVTRHGKIWLDDVSCYGNESALWECQHREWGSHNCYHGEDVGVNCYGEANLGLRLVDGNNSCSGRVEVKFQERWGTICDDGWNLNTAAVVCRQLGCPSSFISSGVVNSPAVLRPIWLDDILCQGNELALWNCRHRGWGNHDCSHNEDVTLTCYDSSDLELRLVGGTNRCMGRVELKIQGRWGTVCHHKWNNAAADVVCKQLGCGTALHFAGLPHLQSGSDVVWLDGVSCSGNESFLWDCRHSGTVNFDCLHQNDVSVICSDGADLELRLADGSNNCSGRVEVRIHEQWWTICDQNWKNEQALVVCKQLGCPFSVFGSRRAKPSNEARDIWINSISCTGNESALWDCTYDGKAKRTCFRRSDAGVICSDKADLDLRLVGAHSPCYGRLEVKYQGEWGTVCHDRWSTRNAAVVCKQLGCGKPMHVFGMTYFKEASGPIWLDDVSCIGNESNIWDCEHSGWGKHNCVHREDVIVTCSGDATWGLRLVGGSNRCSGRLEVYFQGRWGTVCDDGWNSKAAAVVCSQLDCPSSIIGMGLGNASTGYGKIWLDDVSCDGDESDLWSCRNSGWGNNDCSHSEDVGVICSDASDMELRLVGGSSRCAGKVEVNVQGAVGILCANGWGMNIAEVVCRQLECGSAIRVSREPHFTERTLHILMSNSGCTGGEASLWDCIRWEWKQTACHLNMEASLICSAHRQPRLVGADMPCSGRVEVKHADTWRSVCDSDFSLHAANVLCRELNCGDAISLSVGDHFGKGNGLTWAEKFQCEGSETHLALCPIVQHPEDTCIHSREVGVVCSRYTDVRLVNGKSQCDGQVEINVLGHWGSLCDTHWDPEDARVLCRQLSCGTALSTTGGKYIGERSVRVWGHRFHCLGNESLLDNCQMTVLGAPPCIHGNTVSVICTGSLTQPLFPCLANVSDPYLSAVPEGSALICLEDKRLRLVDGDSRCAGRVEIYHDGFWGTICDDGWDLSDAHVVCQKLGCGVAFNATVSAHFGEGSGPIWLDDLNCTGMESHLWQCPSRGWGQHDCRHKEDAGVICSEFTALRLYSETETESCAGRLEVFYNGTWGSVGRRNITTAIAGIVCRQLGCGENGVVSLAPLSKTGSGFMWVDDIQCPKTHISIWQCLSAPWERRISSTAEETWITCEDRIRVRGGDTECSGRVEIWHAGSWGTVCDDSWDLAEAEVVCQQLGCGSALAALRDASFGQGTGTIWLDDMRCKGNESFLWDCHAKPWGQSDCGHKEDAGVRCSGQSLKSLNASSGRLALILSSIFGLLLPVLFILFLTWCRVQKQKHLPLRVSTRRRGSLEENLFHEMETCLKREDPHGTRTSDDTPNHGCEDASDTSLLGVLPASEATK

SEQ ID NO: 249 - DNA, 1925 bp, Homo sapiens
ctgacacgctcctgggtcgtaggcacaggagtgggggccaaagcatggagaatcaagagaaggcgagtatcgcgggccacatgttcgacgtagtcgtgatcggaggtggcatttcaggactatctgctgccaaactcttgactgaatatggcgttagtgttttggttttagaagctcgggacagggttggaggaagaacatatactataaggaatgagcatgttgattacgtagatgttggtggagcttatgtgggaccaacccaaaacagaatcttacgcttgtctaaggagctgggcatagagacttacaaagtgaatgtcagtgagcgtctcgttcaatatgtcaaggggaaaacatatccatttcggggcgcctttccaccagtatggaatcccattgcatatttggattacaataatctgtggaggacaatagataacatggggaaggagattccaactgatgcaccctgggaggctcaacatgctgacaaatgggacaaaatgaccatgaaagagctcattgacaaaatctgctggacaaagactgctaggcggtttgcttatctttttgtgaatatcaatgtgacctctgagcctcacgaagtgtctgccctgtggttcttgtggtatgtgaagcagtgcgggggcaccactcggatattctctgtcaccaatggtggccaggaacggaagtttgtaggtggatctggtcaagtgagcgaacggataatggacctcctcggagaccaagtgaagctgaaccatcctgtcactcacgttgaccagtcaagtgacaacatcatcatagagacgctgaaccatgaacattatgagtgcaaatacgtaattaatgcgatccctccgaccttgactgccaagattcacttcagaccagagcttccagcagagagaaaccagttaattcagcgtcttccaatgggagctgtcattaagtgcatgatgtattacaaggaggccttctggaagaagaaggattactgtggctgcatgatcattgaagatgaagatgctccaatttcaataaccttggatgacaccaagccagatgggtcactgcctgccatcatgggcttcattcttgcccggaaagctgatcgacttgctaagctacataaggaaataaggaagaagaaaatctgtgagctctatgccaaagtgctgggatcccaagaagctttacatccagtgcattatgaagagaagaactggtgtgaggagcagtactctgggggctgctacacggcctacttccctcctgggatcatgactcaatatggaagggtgattcgtcaacccgtgggcaggattttctttgcgggcacagagactgccacaaagtggagcggctacatggaaggggcagttgaggctggagaacgagcagctagggaggtcttaaatggtctcgggaaggtgaccgagaaagacatctgggtacaagaacctgaatcaaaggacgttccagcggtagaaatcacccacaccttctgggaaaggaacctgccctctgtttctggcctgctgaagatcattggattttccacatcagtaactgccctggggtttgtgctgtacaaatacaagctcctgccacggtcttgaagttctgttcttatgctctctgctcactggttttcaataccaccaagaggaaaatattgacaagtttaaaggctgtgtcattgggccatgtttaagtgtactggatttaactacctttggcttaattccaatcattgttaaagtaaaaacaattcaaagaatcacctaattaatttcagtaagatcaagctccatcttatttgtcagtgtagatcaactcatgttaattgatagaataaagccttgtgatcactttctgaaattcacaaagttaaacgtgatgtgctcatcagaaac

SEQ ID NO: 250 - protein, 527 aa, Homo sapiens
MENQEKASIAGHMFDVVVIGGGISGLSAAKLLTEYGVSVLVLEARDRVGGRTYTIRNEHVDYVDVGGAYVGPTQNRILRLSKELGIETYKVNVSERLVQYVKGKTYPFRGAFPPVWNPIAYLDYNNLWRTIDNMGKEIPTDAPWEAQHADKWDKMTMKELIDKICWTKTARRFAYLFVNINVTSEPHEVSALWFLWYVKQCGGTTRIFSVTNGGQERKFVGGSGQVSERIMDLLGDQVKLNHPVTHVDQSSDNIIIETLNHEHYECKYVINAIPPTLTAKIHFRPELPAERNQLIQRLPMGAVIKCMMYYKEAFWKKKDYCGCMIIEDEDAPISITLDDTKPDGSLPAIMGFILARKADRLAKLHKEIRKKKICELYAKVLGSQEALHPVHYEEKNWCEEQYSGGCYTAYFPPGIMTQYGRVIRQPVGRIFFAGTETATKWSGYMEGAVEAGERAAREVLNGLGKVTEKDIWVQEPESKDVPAVEITHTFWERNLPSVSGLLKIIGFSTSVTALGFVLYKYKLLPRS

SEQ ID NO: 251 - DNA, 2491 bp, Homo sapiens
ctggcaggcaggactgggatcgaggcccagaaaacggagcagcgggcaccagggaggcctggaacggggcgagcgccatgagcaacaaatgcgacgtggtcgtggtggggggcggcatctcaggtatggcagcagccaaacttctgcatgactctggactgaatgtggttgttctggaagcccgggaccgtgtgggaggcaggacttacactcttaggaaccaaaaggttaaatatgtggaccttggaggatcctatgttggaccaacccagaatcgtatcttgagattagccaaggagctaggattggagacctacaaagtgaatgaggttgagcgtctgatccaccatgtaaagggcaaatcataccccttcagggggccattcccacctgtatggaatccaattacctacttagatcataacaacttttggaggacaatggatgacatggggcgagagattccgagtgatgccccatggaaggctccccttgcagaagagtgggacaacatgacaatgaaggagctactggacaagctctgctggactgaatctgcaaagcagcttgccactctctttgtgaacctgtgtgtcactgcagagacccatgaggtctctgctctctggttcctgtggtatgtgaagcagtgtggaggcacaacaagaatcatctcgacaacaaatggaggacaggagaggaaatttgtgggcggatctggtcaagtgagtgagcggataatggacctccttggagaccgagtgaagctggagaggcctgtgatctacattgaccagacaagagaaaatgtccttgtggagaccctaaaccatgagatgtatgaggctaaatatgtgattagtgctattcctcctactctgggcatgaagattcacttcaatccccctctgccaatgatgagaaaccagatgatcactcgtgtgcctttgggttcagtcatcaagtgtatagtttattataaagagcctttctggaggaaaaaggattactgtggaaccatgattattgatggagaagaagctccagttgcctacacgttggatgataccaaacctgaaggcaactatgctgccataatgggatttatcctggcccacaaagccagaaaactggcacgtcttaccaaagaggaaaggttgaagaaactttgtgaactctatgccaaggttctgggttccctagaagctctggagccagtgcattatgaagaaaagaactggtgtgaggagcagtactctgggggctgctacacaacttatttcccccctgggatcctgactcaatatggaagggttctacgccagccagtggacaggatttactttgcaggcaccgagactgccacacactggagcggctacatggagggggctgtagaggccggggagagagcagcccgagagatcctgcatgccatggggaagattccagaggatgaaatctggcagtcagaaccagagtctgtggatgtccctgcacagcccatcaccaccacctttttggagagacatttgccctccgtgccaggcctgctcaggctgattggattgaccaccatcttttcagcaacggctcttggcttcctggcccacaaaagggggctacttgtgagagtctaaagagagagggtgtctgtaatcacactctcttcttactgtatttgggatatgagtttggggaaagagttgcaagtaaagttccatgaagacaaatagtgtggagtgaggcgggggagcatgaagataaatccaactctgactgtaaaatacaatggtatctctttctccgttgtggcccctgcttagtgtcccttacctggcttagcgttctgtttcaccagtttccaagtttattgccctcaaatctttagaatagttaaattggcttgtttaaggttcttgctgccccacaacacaccttgcccatgcacaggatgaattttttcctaccattatggctttgtgcttgttcttcctcttacctgtatagcctcacttccctagttctttgcattcgtccttaggtactgtattgttacagctgaaagacagtaaagaccatttagtcctcaccttctgttttagagttgagcaaactgaagcccacagaggtggaacttaattacctaagagccacaataagccactggtatctgggggactagaacacaaataattgcttttcccacctctttggatgttttccccaattatcctccttcactccctgtcatagttaccgatggtgtcccgttgtgtgggtttactctgtgctaagttgtcttacacttctcaaatgctactcagtatatagccttaactcttactgttttgtgcggtgtgtctccagctgattttaacttttttgatggtagaaattttatctcttcttccttttgtatcctccattgtatcttcatacaaaggacagtacacacttgggtaattaaaaataaaagttgattgaccat

SEQ ID NO: 252 - protein, 520 aa, Homo sapiens
MSNKCDVVVVGGGISGMAAAKLLHDSGLNVVVLEARDRVGGRTYTLRNQKVKYVDLGGSYVGPTQNRILRLAKELGLETYKVNEVERLIHHVKGKSYPFRGPFPPVWNPITYLDHNNFWRTMDDMGREIPSDAPWKAPLAEEWDNMTMKELLDKLCWTESAKQLATLFVNLCVTAETHEVSALWFLWYVKQCGGTTRIISTTNGGQERKFVGGSGQVSERIMDLLGDRVKLERPVIYIDQTRENVLVETLNHEMYEAKYVISAIPPTLGMKIHFNPPLPMMRNQMITRVPLGSVIKCIVYYKEPFWRKKDYCGTMIIDGEEAPVAYTLDDTKPEGNYAAIMGFILAHKARKLARLTKEERLKKLCELYAKVLGSLEALEPVHYEEKNWCEEQYSGGCYTTYFPPGILTQYGRVLRQPVDRIYFAGTETATHWSGYMEGAVEAGERAAREILHAMGKIPEDEIWQSEPESVDVPAQPITTTFLERHLPSVPGLLRLIGLTTIFSATALGFLAHKRGLLVRV

SEQ ID NO: 253 - DNA, 2329 bp, Homo sapiens
aggacctgagctcagcttccgccccagccagggaagcggcaggggaaagcaccggctccaggccagcgtgggccgctctctcgctcggtgcccgccgccatgtgggccgtcctgaggttagccctgcggccgtgtgcccgcgcctctcccgccgggccgcgcgcctatcacggggactcggtggcctcgctgggcacccagccggacttgggctctgccctctaccaggagaactacaagcagatgaaagcactagtaaatcagctccatgaacgagtggagcatataaaactaggaggtggtgagaaagcccgagcacttcacatatcaagaggaaaactattgcccagagaaagaattgacaatctcatagacccagggtctccatttctggaattatcccagtttgcaggttaccagttatatgacaatgaggaggtgccaggaggtggcattattacaggcattggaagagtatcaggagtagaatgcatgattattgccaatgatgccaccgtcaaaggaggtgcctactacccagtgactgtgaaaaaacaattacgggcccaagaaattgccatgcaaaacaggctcccctgcatctacttagttgattcgggaggagcatacttacctcgacaagcagatgtgtttccagatcgagaccactttggccgtacattctataatcaggcaattatgtcttctaaaaatattgcacagatcgcagtggtcatgggctcctgcaccgcaggaggagcctatgtgcctgccatggctgatgaaaacatcattgtacgcaagcagggtaccattttcttggcaggaccccccttggttaaagcggcaactggggaagaagtatctgctgaggatcttggaggtgctgatcttcattgcagaaagtctggagtaagtgaccactgggctttggatgatcatcatgcccttcacttaactaggaaggttgtgaggaatctaaattatcagaagaaattggatgtcaccattgaaccttctgaagagcctttatttcctgctgatgaattgtatggaatagttggtgctaaccttaagaggagctttgatgtccgagaggtcattgctagaatcgtggatggaagcagattcactgagttcaaagccttttatggagacacattagttacaggatttgctcgaatatttgggtacccagtaggtatcgttggaaacaacggagttctcttttctgaatctgcaaaaaagggtactcactttgtccagttatgctgccaaagaaatattcctctgctgttccttcaaaacattactggatttatggttggtagagagtatgaagctgaaggaattgccaaggatggtgccaagatggtggccgctgtggcctgtgcccaagtgcctaagataaccctcatcattgggggctcctatggagccggaaactatgggatgtgtggcagagcgtatagcccaagatttctctacatttggccaaatgctcgtatctcagtgatgggaggagagcaggcagccaatgtgttggccacgataacaaaggaccaaagagcccgggaaggaaagcagttctccagtgctgatgaagcggctttaaaagagcccatcattaagaagtttgaagaggaaggaaacccttactattccagcgcaagggtatgggatgatgggatcattgatccagcagacaccagactggtcttgggtctcagttttagtgcagccctcaacgcaccaatagagaagactgacttcggtatcttcaggatgtaactggaataaaggatgttttctgttggacatgtactgaaaattaacacatgtagtagccttaaaattttagacttctcgaacatgaggctgttacagtaatttttttaacactgtgcattgtacttttctaccttaaaaaaatcagtgaggatatttatttaatgaacatcaattccttttaaattttcttagagaaatttctctgtggctcagttttaccacccataaagcggagacagtaatttatggttatcctttctgacccacaaagtatgaaaagttctgtaatctgtaaactcagttctgtaatctgtattattgagatgattaatataaagttgtattttcactgaaatgattgttttgctggttatgcttggtgatattttagcgggcttatttttgaaaggcatctgttacttcagttgcataaagtgccctcacactgctgtgcagccattaccaccattcatctccagaatttgttctcagtcccaaactgaaactataccattcaaacaacagcgctccccatttc

SEQ ID NO: 254 - protein, 563 aa, Homo sapiens
MWAVLRLALRPCARASPAGPRAYHGDSVASLGTQPDLGSALYQENYKQMKALVNQLHERVEHIKLGGGEKARALHISRGKLLPRERIDNLIDPGSPFLELSQFAGYQLYDNEEVPGGGIITGIGRVSGVECMIIANDATVKGGAYYPVTVKKQLRAQEIAMQNRLPCIYLVDSGGAYLPRQADVFPDRDHFGRTFYNQAIMSSKNIAQIAVVMGSCTAGGAYVPAMADENIIVRKQGTIFLAGPPLVKAATGEEVSAEDLGGADLHCRKSGVSDHWALDDHHALHLTRKVVRNLNYQKKLDVTIEPSEEPLFPADELYGIVGANLKRSFDVREVIARIVDGSRFTEFKAFYGDTLVTGFARIFGYPVGIVGNNGVLFSESAKKGTHFVQLCCQRNIPLLFLQNITGFMVGREYEAEGIAKDGAKMVAAVACAQVPKITLIIGGSYGAGNYGMCGRAYSPRFLYIWPNARISVMGGEQAANVLATITKDQRAREGKQFSSADEAALKEPIIKKFEEEGNPYYSSARVWDDGIIDPADTRLVLGLSFSAALNAPIEKTDFGIFRM

SEQ ID NO: 255 - DNA, 1878 bp, Homo sapiens
  misc_feature 1107: n = A,T,C or G
ctgacactgaacgccgcttgtcccctccggcttgccgtcctcgcagccatggcggccgccgcgctcccagcatggctgtctctgcagtcgagggcaaggactctgcgtgcattctccactgccgtctactcggccactccggtcccgacacctagcctgccggaaagaacacccggaaatgaaaggccaccaagaagaaaggcactacctcctaggacagagaaaatggctgttgaccaggactggcctagtgtttacccagttgcagcaccatttaaaccctctgcagtacctcttcctgttcgaatgggttatccagtaaaaaagggcgtgccatggcaaaggagggaaatctagaacttttaaagattcccaattttctgcatttgactcctgtagcaattaaaaagcactgtgaagcccttaaagatttttgcactgagtggccagccgcactggacagtgacgagaaatgtgagaagcattttccaattgaaattgacagcactgattatgtttcatcaggaccatctgttcggaaccccagagcacgagtagtagtcttaagagtaaagctttccagtttgaatttagatgatcacgcaaagaagaaattaattaaacttgtaggagagcgatactgcaagaccacagatgtgcttaccatcaaaacagataggtgccctttaaggaggcagaattacgattatgcagtgtatctactaacagtgttataccatgagtcttggaatactgaagaatgggaaaaaagtaagactgaagcagacatggaagagtatatatgggaaaatagctcatcagaaagaaatatcctggaaacgcttctccagatgaaagctgctgagaaaaatatggaaataaataaagaagagctccttggtactaaagaaattgaagagtacaaaaagtctgttgttagtcttaaaaatgaggaggaaaatgaaaattccatttctcagtacaaagaatccgtgaagagactattaaatgtgacatgaattatggagtagaaaaatctgcttgatttattaattttatgatatatgtgatcagtatctaatttgatataaaattgaaaatgttaanaaaatcattttttttcctcagagttaaaattatttccctcatactaatgcttaatggcaatgattactccagagttttttaatttttacactggggcaatagactaggaggtctctgatttcttcttggtctaaagtgttttgattttatttctacataatagctttggtattcatgtatatacatgcatttaattgtgattttatcacctttcccatttctttccccacaagctggcatttcagtagttgcttttgaataatggttttggttacctgggaaggcaggcccagaacccatttccttgacttgcagttccgggctgtgttcacatgactgctgtctagctgatgcatttttcacatttgtcaactctggttagaaacaggtcctcaggagtattctctaacctgatattttctaaaaagatatgttgattcaactttgtttagcatcctactttctagattgtggggctcattttgccagggccaagctaccagaaaagtagaagtggagattacctggtatgtatctctctgggtgccccagttagagctgccacagctcaggaaaaagatgaggcataacgaccttgaatgtaattggagtaagtgacaaaataagaactaccctgggaaaccctgcattcaatgtagctgtcaattcagtatttttaagtacacctgtcagctgtttcttaccacttcgatggttgtgattaatttaaaatcaaaataaaggaattactgagtttaaaaaaaaaaaaaa

SEQ ID NO: 256 - protein, 227 aa, Homo sapiens [sequence omitted]

SEQ ID NO: 257 - DNA, 2511 bp, Homo sapiens
cttttcacactggccttaaagaggatatattagaagttgaagtaggaagggagccagagaggccgatggcgcaaaggtacgacgatctaccccattacgggggcatggatggagtaggcatcccctccacgatgtatggggacccgcatgcagccaggtccatgcagccggtccaccacctgaaccacgggcctcctctgcactcgcatcagtacccgcacacagctcataccaacgccatggcccccagcatgggctcctctgtcaatgacgctttaaagagagataaagatgccatttatggacaccccctcttccctctcttagcactgatttttgagaaatgtgaattagctacttgtaccccccgcgagccgggggtggcgggcggggacgtctgctcgtcagagtcattcaatgaagatatagccgtgttcgccaaacagattcgcgcagaaaaacctctattttcttctaatccagaactggataacttgatgattcaagccatacaagtattaaggtttcatctattggaattagagaaggtacacgaattatgtgacaatttctgccaccggtatattagctgtttgaaagggaaaatgcctatcgatttggtgatagacgatagagaaggaggatcaaaatcagacagtgaagatataacaagatcagcaaatctaactgaccagccctcttggaacagagatcatgatgacacggcatctactcgttcaggaggaaccccaggcccttccagcggtggccacacgtcacacagtggggacaacagcagtgagcaaggtgatggcttggacaacagtgtagcttcccccagcacaggtgacgatgatgaccctgataaggacaaaaagcgtcacaaaaagcgtggcatctttcccaaagtagccacaaatatcatgagggcgtggctgttccagcatctaacacacccttacccttctgaagaacagaaaaagcagttggcacaagacacgggactcaccatccttcaagtgaacaattggtttattaatgcccggagaagaatagtgcagcccatgatagaccagtccaaccgagcagtaagtcaaggaacaccttataatcctgatggacagcccatgggaggtttcgtaatggacggtcagcaacatatgggaattagagcaccaggacctatgagtggaatgggcatgaatatgggcatggaggggcagtggcactacatgtaaccttcatctagttaaccaatcgcaaagcaagggggaaggctgcaaagtatgccaggggagtatgtagcccggggtggtccaatgggtgtgagtatgggacagccaagttatacccaaccccagatgcccccccatcctgctcagctgcgtcatgggccccccatgcatacgtacattcctggacaccctcaccacccaacagtgatgatgcatggaggaccgccccaccctggaatgccaatgtcagcatcaagccccacagttcttaatacaggagacccaacaatgagtggacaagtcatggacattcatgctcagtagcttaagggaatatgcattgtctgcaatggtgactgatttcaaatcatgttttttctgcaatgactgtggagttccattcttggcatctactctggaccaaggagcatccctaattcttcatagggacctttaaaaagcaggaaataccaactgaagtcaatttgggggacatgctaaataactatataagacattaagagaacaaagagtgaaatattgtaaatgctattatactgttatccatattacgttgtttcttatagattttttaaaaaaaatgtgaaatttttccacactatgtgtgttgtttccatagctcttcacttcctccagaagcctccttacattaaaaagccttacagttatcctgcaagggacaggaaggtctgatttgcaggatttttagagcattaaaataactatcaggcagaagaatctttcttctcgcctaggatttcagccatgcgcgcgctctctctctttctctctcttttcctctctctccctctttctagcctggggcttgaatttgcatgtctaattcatttactcaccatatttgaattggcctgaacagatgtaaatcgggaaggatgggaaaaactgcagtcatcaacaatgattaatcagctgttgcaggcagtgtcttaaggagactggtaggaggaggcatggaaaccaaaaggccgtgtgtttagaagcctaattgtcacatcaagcatcattgtccccatgcaacaaccaccaccttatacatcacttcctgttttaagcagctctaaaacatagactgaagatttatttttaatatgttgactttatttctgagcaaagcatcggtcatgtgtgtattttttcatagtcccaccttggagcatttatgtagacattgtaaataaattttgtgcaaaaaggactggaaaaatgaactgtattattgcaattttttttt

SEQ ID NO: 258 - protein, 390 aa, Homo sapiens
MAQRYDDLPHYGGMDGVGIPSTMYGDPHAARSMQPVHHLNHGPPLHSHQYPHTAHTNAMAPSMGSSVNDALKRDKDAIYGHPLFPLLALIFEKCELATCTPREPGVAGGDVCSSESFNEDIAVFAKQIRAEKPLFSSNPELDNLMIQAIQVLRFHLLELEKVHELCDNFCHRYISCLKGKMPIDLVIDDREGGSKSDSEDITRSANLTDQPSWNRDHDDTASTRSGGTPGPSSGGHTSHSGDNSSEQGDGLDNSVASPSTGDDDDPDKDKKRHKKRGIFPKVATNIMRAWLFQHLTHPYPSEEQKKQLAQDTGLTILQVNNWFINARRRIVQPMIDQSNRAVSQGTPYNPDGQPMGGFVMDGQQHMGIRAPGPMSGMGMNMGMEGQWHYM

SEQ ID NO: 259 - DNA, 1195 bp, Homo sapiens
ggcacgaggcgccagtcccctaaccctgaggctgccgcgcggcggtcactgcgccggggtagtgggccccagtgttgcgctctctggccgttccttacactttgcttcaggctccagtgcaggggcgtagtgggatatggccaactcgggctgcaaggacgtcacgggtccagatgaggagagttttctgtactttgcctacggcagcaacctgctgacagagaggatccacctccgaaacccctcggcggcgttcttctgtgtggcccgcctgcaggattttaagcttgactttggcaattcccaaggcaaaacaagtcaaacttggcatggagggatagccaccatttttcagagtcctggcgatgaagtgtggggagtagtatggaaaatgaacaaaagcaatttaaattctctggatgagcaagaaggggttaaaagtggaatgtatgttgtaatagaagttaaagttgcaactcaagaaggaaaagaaataacctgtcgaagttatctgatgacaaattacgaaagtgctcccccatccccacagtataaaaagattatttgcatgggtgcaaaagaaaatggtttgccgctggagtatcaagagaagttaaaagcaatagaaccaaatgactatacaggaaaggtctcagaagaaattgaagacatcatcaaaaagggggaaacacaaactctttagaacataacagaatatatctaagggtattctatgtgctaatataaaatatttttaacacttgagaacagggatctgggggatctccacgtttgatccgttttcagcagtgctctgaaggagtatcttacttgggtgattccttgtttttagactataaaaagaaactgggataggagttagacaatttaaaaggggtgtatgagggcctgaaatatgtgacaaatgaatgtgagtaccccttctgtgaacactgaaagctattctcttgaattgatcttaagtgtctccttgctctggtaaaagatagatttgtagctcacttgatgatggtgctggtgaattgctctgctctgtctgagatttttaaaaatcagcttaatgagagtaatctgcagacaattgataataacattttgaaaattggaaagatggtatactgtttttagaggaataaacgtatttgtggtttaaaaaaaaaaaaaaaaaaaaaaa

SEQ ID NO: 260 - protein, 188 aa, Homo sapiens
MANSGCKDVTGPDEESFLYFAYGSNLLTERIHLRNPSAAFFCVARLQDFKLDFGNSQGKTSQTWHGGIATIFQSPGDEVWGVVWKMNKSNLNSLDEQEGVKSGMYVVIEVKVATQEGKEITCRSYLMTNYESAPPSPQYKKIICMGAKENGLPLEYQEKLKAIEPNDYTGKVSEEIEDIIKKGETQTL

SEQ ID NO: 261 - DNA, 2392 bp, Homo sapiens
gcggagcgcgcgctcccagcgaaagcagcagggcagggatctgcgttggaggaagggactgctctggtgctagaatgctgtgcgtcggaaggctgggcggcttgggagccagagcagcagctctgccgccccgccgggcgggccggggaagcctcgaagccgggatccgggcccgaagggtcagcaccagctggtctcccgtgggcgccgccttcaatgtcaagccccagggcagccgcttggacctgttcggcgagcgggcgcgtctttttggagttcctgagctgagtgccccagaaggatttcatattgcacaagaaaaagccttgagaaagacagaattgcttgtggaccgtgcatgttccaccccacctgggccccagaccgtgctgatcttcgatgagctctcggattccttatgcagagtggccgacttggctgattttgtgaaaatcgctcaccctgagccagcattcagagaagctgcggaagaagcttgtagaagtattggcaccatggtagagaagttgaacacaaatgtggatttatatcaaagtttgcaaaaattactagctgataaaaaacttgtggattcccttgatccagaaacaaggcgagtggctgaactgtttatgtttgattttgaaattagtggaatccatctagacaaacaaaagcgtaaaagagcagtggacctcaatgttaaaatcttggatttgagtagtacatttcttatgggaaccaattttcccaacaagattgagaagcatctcttaccagaacacattcgtcgtaactttacatctgctggggatcatatcataattgatggtctccacgcagaatcaccagatgacttggtgcgagaagctgcttataaaatttttctttatcccaatgctggtcaattgaaatgtttagaagaattgctcagcagcagagatcttctggcaaagttggtggggtattccacgttttctcacagggctctccaaggaacgatagctaaaaatccagagactgtcatgcagttccttgaaaaactatctgacaaactttctgaaagaactctgaaagattttgagatgatacgagggatgaaaatgaaactgaatgctcaaaattccgaagtaatgccctgggaccccccttactacagtggtgtgattcgtgcagaaaggtataatattgagcccagcctatattgcccgtttttctctcttggagcatgcatggaaggcctgaatattttgcttaacagactgttggggatttcattatatgcagagcagcctgcaaaaggagaggtgtggagcgaagatgtccgaaaactggctgttgttcatgaatctgaaggattgttggggtacatttactgtgatttttttcagcgagcagacaaaccacatcaggattgccatttcactatccgtggaggcagactaaaggaagatggagactatcaactcccacttgtagttcttatgctgaatcttccccgttcctcaaggagttctccaactttgctaactcctggcatgatggaaaatcttttccatgaaatgggacatgccatgcattcaatgctaggacgtactcgttaccaacacgtcactgggaccaggtgccctactgattttgctgaggttccttctattctgatggagtactttgcaaatgattatcgagtagttaaccaatttgccagacattatcagactggacagccactgccaaaaaatatggtgtctcgtctttgtgaatctaaaaaggtttgtgctgcagctgatatgcaacttcaggtcttttatgccactctggatcaaatctaccatgggaagcatcccctgaggaattcaaccacagacattctcaaggaaacacaagagaaattctatggcctaccatatgttccaaatactgcctggcagctgcgattcagccacctcgtggggtatggtgctagatattactcttacctcatgtccagagcggtcgcctccatggtttggaaggagtgttttctacaggatcctttcaacagggctgccggggagcgctatcgcagggagatgctggcccacggtggaggcagggagcccatgctcatggttgaaggtatgcttcagaagtgtccttctgttgatgacttcgtaagtgccctcgtttccgacttggatctggacttcgaaactttcctcatggattctgaataaaagaaacactctacacctctaatcaaggtcatgtagtaatgactttgttataaatgctacagctgtgagagcttgtttctgattgtttcattgttcgcttctgtaattctgaaaaactttaaactggtagaacttggaataaataatttgttttaattaaaaaaaaaaaaaaaaaa

SEQ ID NO: 262 - protein, 713 aa, Homo sapiens
MLCVGRLGGLGARAAALPPRRAGRGSLEAGIRARRVSTSWSPVGAAFNVKPQGSRLDLFGERARLFGVPELSAPEGFHIAQEKALRKTELLVDRACSTPPGPQTVLIFDELSDSLCRVADLADFVKIAHPEPAFREAAEEACRSIGTMVEKLNTNVDLYQSLQKLLADKKLVDSLDPETRRVAELFMFDFEISGIHLDKQKRKRAVDLNVKILDLSSTFLMGTNFPNKIEKHLLPEHIRRNFTSAGDHIIIDGLHAESPDDLVREAAYKIFLYPNAGQLKCLEELLSSRDLLAKLVGYSTFSHRALQGTIAKNPETVMQFLEKLSDKLSERTLKDFEMIRGMKMKLNAQNSEVMPWDPPYYSGVIRAERYNIEPSLYCPFFSLGACMEGLNILLNRLLGISLYAEQPAKGEVWSEDVRKLAVVHESEGLLGYIYCDFFQRADKPHQDCHFTIRGGRLKEDGDYQLPLVVLMLNLPRSSRSSPTLLTPGMMENLFHEMGHAMHSMLGRTRYQHVTGTRCPTDFAEVPSILMEYFANDYRVVNQFARHYQTGQPLPKNMVSRLCESKKVCAAADMQLQVFYATLDQIYHGKHPLRNSTTDILKETQEKFYGLPYVPNTAWQLRFSHLVGYGARYYSYLMSRAVASMVWKECFLQDPFNRAAGERYRREMLAHGGGREPMLMVEGMLQKCPSVDDFVSALVSDLDLDFETFLMDSE

SEQ ID NO: 263 - DNA, 9390 bp, Homo sapiens
ggcaatttcttttcctttctaactgtggcccgcgttgtgctgttgctgggcaggcgttgggcgccggcggtcttcgagcgtgggggcccgctggctttcccttctcagaaactgcgccgggggcgctcgcttgccccggattcggacgcggcgctccccgggctcgtctgaagtgcagatcgccgcagaggccccagtgcccggatgtccatcaggattagcgcgagccaatacgggccgagcccggggctgcgccgaggacgcccggggctcgagagcaggtagtcccgtaacatcggggcgccgcgccgggacgcgtccccgcccggctccgccaaatggtgagcgcggcgctggcagcagggcccgcggggtgaaggcgctcatggacggaagacccctggctctataagctgaattatggcagcccagtcaagtttgtacaatgacgacagaaacctgcttcgaattagagagaaggaaagacgcaaccaggaagcccaccaagagaaagaggcatttcctgaaaagattcccctttttggagagccctacaagacagcaaaaggtgatgagctgtctagtcgaatacagaacatgttgggaaactacgaagaagtgaaggagttccttagtactaagtctcacactcatcgcctggatgcttctgaaaataggttgggaaagccgaaatatcctttaattcctgacaaagggagcagcattccatccagctccttccacactagtgtccaccaccagtccattcacactcctgcgtctggaccactttctgttggcaacattagccacaatccaaagatggcgcagccaagaactgaaccaatgccaagtctccatgccaaaagctgcggcccaccggacagccagcacctgacccaggatcgccttggtcaggaggggttcggctctagtcatcacaagaaaggtgaccgaagagctgacggagaccactgtgcttcggtgacagattcggctccagagagggagctttctcccttaatctctttgccttccccagttccccctttgtcacctatacattccaaccagcaaactcttccccggacgcaaggaagcagcaaggttcatggcagcagcaataacagtaaaggctattgcccagccaaatctcccaaggacctagcagtgaaagtccatgataaagagacccctcaagacagtttggtggcccctgcccagccgccttctcagacatttccacctccctccctcccctcaaaaagtgttgcaatgcagcagaagcccacggcttatgtccggcccatggatggtcaagatcaggcccctagtgaatcccctgaactgaaaccactgccggaggactatcgacagcagacctttgaaaaaacagacttgaaagtgcctgccaaagccaagctcaccaaactgaagatgccttctcagtcagttgagcagacctactccaatgaagtccattgtgttgaagagattctgaaggaaatgacccattcatggccgcctcctttgacagcaatacatacgcctagtacagctgagccatccaagtttcctttccctacaaaggactctcagcatgtcagttctgtaacccaaaaccaaaaacaatatgatacatcttcaaaaactcactcaaattctcagcaaggaacgtcatccatgctcgaagacgaccttcagctcagtgacagtgaggacagtgacagtgaacaaaccccagagaagcctccctcctcatctgcacctccaagtgctccacagtcccttccagaaccagtggcatcagcacattccagcagtgcagagtcagaaagcaccagtgactcagacagttcctcagactcagagagcgagagcagttcaagtgacagcgaagaaaatgagcccctagaaaccccagctccggagcctgagcctccaacaacaaacaaatggcagctggacaactggctgaccaaagtcagccagccagctgcgccaccagagggccccaggagcacagagcccccacggcggcacccagagagtaagggcagcagcgacagtgccacgagtcaggagcattctgaatccaaagatcctccccctaaaagctccagcaaagccccccgggccccacccgaagccccccaccccggaaagaggagctgtcagaagtctccggcacagcaggagcccccacaaaggcaaaccgttggaaccaaacaacccaaaaaacctgtcaaggcctctgcccgggcaggttcacggaccagcctgcagggggaaagggagccagggcttcttccctatggctcccgagaccagacttccaaagacaagcccaaggtgaagacgaaaggacggccccgggccgcagcaagcaacgaacccaagccagcagtgcccccctccagtgagaagaagaagcacaagagctccctccctgccccctctaaggctctctcaggcccagaacccgcgaaggacaatgtggaggacaggacccctgagcactttgctcttgttcccctgactgagagccagggcccaccccacagtggcagcggcagcaggactagtggctgccgccaagccgtggtggtccaggaggacagccgcaaagacagactcccattgcctttgagagacaccaagctgctctcaccgctcagggacactcctcccccacaaagcttgatggtgaagatcaccctagacctgctctctcggataccccagcctcccgggaaggggagccgccagaggaaagcagaagataaacagccgcccgcagggaagaagcacagctctgagaagaggagctcagacagctcaagcaagttggccaaaaagagaaagggtgaagcagaaagagactgtgataacaagaaaatcagactggagaaggaaatcaaatcacagtcatcttcatcttcatcctcccacaaagaatcttctaaaacaaagccctccaggccctcctcacagtcctcaaagaaggaaatgctccccccgccacccgtgtcctcgtcctcccagaagccagccaagcctgcacttaagaggtcaaggcgggaagcagacacctgtggccaggaccctcccaaaagtgccagcagtaccaagagcaaccacaaagactcttccattcccaagcagagaagagtagaggggaagggctccagaagctcctcggagcacaagggttcttccggagatactgcaaatccttttccagtgccttctttgccaaatggtaactctaaaccagggaagcctcaagtgaagtttgacaaacaacaagcagaccttcacatgagggaggcaaaaaagatgaagcagaaagcagagttaatgacggacagggttggaaaggcttttaagtacctggaagccgtcttgtccttcattgagtgcggaattgccacagagtctgaaagccagtcatccaagtcagcttactctgtctactcagaaactgtagatctcattaaattcataatgtcattaaaatccttctcagatgccacagcgccaacacaagagaaaatatttgctgttttatgcatgcgttgccagtccattttgaacatggcgatgtttcgttgtaaaaaagacatagcaataaagtattctcgtactcttaataaacacttcgagagttcttccaaagtcgcccaggcaccttctccatgcattgcaagcacaggcacaccatcccctctttccccaatgccttctcctgccagctccgtagggtcccagtcaagtgctggcagtgtggggagcagtggggtggctgccactatcagcaccccagtcaccatccagaatatgacatcttcctatgtcaccatcacatcccatgttcttaccgcctttgacctttgggaacaggccgaggccctcacgaggaagaataaagaattctttgctcggctcagcacaaatgtgtgcaccttggccctcaacagcagtttggtggacctggtgcactatacacgacagggttttcagcagctacaagaattaaccaaaacaccttaatggagccccaggttgattcaatgccttgggaactatttttgcacattggaagcctcaaaaacagtccagacgtttgtttcatcaggacaccaaactctaaaaaagaagcaccacgagatggccaggacatttgtccacttaaactctcaacaacagtgtgatcattggttggacactgtggttatgcagaagcagagatgaggaggctggccccagagatgatcttgcccttcctaactaaaggacagaagtgcaatttagcttaaatgggtgtatgaatggtctagaaacatttctattttttttttaaaccagcaggatacaagttgcaaatgaaatgaggagaaacagtttcaactctgaaagtgaatttcacgtcatctcagtagccacgctagtccattcccagaaggaaatttttttttttaacaatgacttttggtaaagggttttgtggatgattttttttcttttgagttttgggagaaatatttgtttaataacttctaatggccatctgtaaaccataagtaatgaaggactccactgtgccccactttctgccaatgaacagtggcttgataataccaagtattgttgtaatttataaaattgaaggcaacccccgctcctgccgcccccaatctccccattgcctagagcgctgcacattgaccccagctctgacttctcattactgtgctgaaagtcagcccacgtcggagcggtgaggaggagccacagcacatggggtgccacctcgaggtctgcacaggaggacttggcgctgccatttcctacccctgccatttcccacccctgcttcagcgaaagggactctctaacagggcagtcactgttgactctattctgaatttcctcccttggggaagaagggaaccaacatttatacctgaccagatggctaaagtgcttttaaagttttgtttaagtagagctggaatttgaggtgctgatctgtggtctacagttatgtggtaactcatgttgtccagccaactcagagtttcgtcagtgaacaagaaacatgaaatctgcttcttagagaggctatatttttctgctacaaatattttatatttatagcaaaactagactttcagagtccttgattgtctaggggaagttaactccctgagaggatgtagagatttggggtggttgattagacttttgaaaaactcatcaccacatgccttcactccagagtgttctcagctagatttgatttggttgaggaggaactgtggccctccgtaagttattgccatagtgtatgcattaaaccaagtccattttgaatgacctaaaatgaagtaacacaatcagaaatcccatgtgcccataagcacagatttttctttttcattgaaactttaaaggttattattggaaacattactttgagtgcagtgtttttaaaagccaattcttttttatcccttttagaagtagaatttgcacacttactacaattgaggagtgtcatctctataactttttctccgcctttgtcccattctgcccctggacatgtttcctaccaagcatgtttcacattttcctattagtggaggagggagaaccatatttatttataatgaagacatctaagatccctatgatgaatgcaggaactctcttggtagtttgtaaatacacaaagggatgtgtcgagggatgggagcgatgcttatctctcacagtgtgagtggtctgtgtgaggctgttccttcagttcttctccagactgttctttggttgtcacttaagtcagaggtctggtccctcatgtttaggtgaaagccagagaatgacagctgtagtcatatctgagcataagaccttgatgtgtgattcctgatgaccggtttcatttattcatgtaataaagcaaaggccctggtcctttttaaactactagttttaaaaacctgtgttaaatgaacagtaattgcctggtaggtttggtgtgtgtgtagcattgtgtgtccatctgttatatgtaaaggacaaggcaccagaatcaggctttatttcgatattgaagatgttatttaacatctttcttttttccttactcccttagccatcccctccccttttgtcctatcattccctagaacaagccacctgtcaattgtgaagggttgtgttctttatggcaggttctatgcagattgtgccagagcatgtgcgtgttctgttggcaagccacagtgctcccttgactgaagacatttccaggtagatttctcagccagctctaaaacagattgctttttcagtggccttactctttgtgggtttttttttttctctgaacttgatataaagattttatttgtcccttgaaaaagtaacaaatgtgcatagatcaatttgtactactttggtcattggatatttctgatccttattgcattgtacctaaaggagagtaactaatggtaacctttttaatagagtatgtgaaaggtagtggctgatgaatccttaacgttcatagggtctttttgctgttacggttgtatatagaggtctgaaggatttttaaaatgatttgcactttttcactgcatgcttacaattcccaaaggcaaaatctgtactgaggtagatcatttgaaagggctagattataaaattaagccttagagtatggaaagttcttataacaataatagtacacacttcagagtaagacaaatgcaaagcatcttaaggagtgaaaatagagtctaaatcttgcctttggcactacaaggtgtgtgtgtgtgtgtgtgttgtgtgtctttagtaggaaatggaagaacactgttttattttttaaagtgtttaatgtttctgtcctttctgtgaattattgaatttaagagccctgctaaataatgaaaaaacactttactaaaatttatcaaattatactgggttcggattgtgaaaacattggccacctagtagcagtggtgaggagtgggagggcccagcaagcatttatcagaaatagaatcacaataggaggagaatttggctgtctgatattatgatttgattacaatactgaatgggaaaagtatctaatattttgtaacaaaaagaccttcatattatctgttttgaccaaaatatgtagctatttcccttacacagattggaccgcacttatctcccttgtcctgtatcctttaatttcaggtctcaggatgtttagaaagctaaaaccccctacccctttctggctgaaaacttgccttatttggtatcttacacattaatgttactagcatcaggagcttactgttttattatgattcatcttcagtaatttttagaagcaagaagaaagccattgtgtcctctacaattaacaaaacttatctctgatatacaaagggatataaatatatacacttaaatagagaaaaagaggttgattgaattgtgcctttgagtgaacccagtttttaaataccgctgtgtttgtttcgccatggcttcagggatgctacatggctcttgcaccttttactcctctgctttatgaagtttgagttgtatttgtgcatcttaaagtaggttgaggcttgaggctgggctttcgggtttttttgttttttgttttgttttgttttgttttgttttcttgtacttaaacctgcttgcttcctaccacagattctttattttcccaaacactacaaaaaaacttttaaaactttgccatttcatctgtttacactctttgccactgattagcagtatttaaatcttgcaagaatattttgtgctttctttagaaacacaagagtatagatttttctcactgaaaagtgagagttacgcattgcagccatgaagggatgctaggatcaattatggcagtaccttttttcccctcctgttcttgagccagttgtctcttttgttttgggtcccacttaggattaacggatgtaaggtattttcctgtgcctttattttgtgtcattctattggaaggaggtgtaacggcagaatagcatcgtgttgggggttttccttcaaacactgcaagtgatattgccaccatgtgaacctcaaatatgcaatccagttgtgttggtttctcggtgacttggagtgttcatctcttcatgaattgtgagcactgaccatgttcttcagttcttaattatggtgagttgacaaataccaactactgcttttctttaggtggctataaatttcttactgtcaggaggaaatgacattatattctgttccactgaacgtcagagatcagcaggcactgtactgggtagagaagtgcctatacttctctacctaagagggcaggagggaaaccctacagctccttgtgagcctatatattagtatatcggcctggagaggacaagggaataagaccactcatagtgaggctggccaagctgcactggtcggaccaggcagtggctgacctaaggaaggcaacttgctttgcttaaaagtagattttttaagcaatgcttaacacaggcagcattcacctttgttcaggccatcgacatgtattgttaaaattactgcatatccccctcagatatcaagtatacactgttcatgttggggttgtgtgtgtgtatgtgtgtatgtacgcacgcatgtgtcccaaatcttgttttaattttttttttctgaatgtgatcatgttttggataatacctgagcagggttgccttttttttatttattaccattatatattatattatattatatattttttgctttcttataactttggaggaaagtcaaatcttggtattattaaaattgttttaaaaaggagtaaattttccagttgataaatgaaaatcactggcctatgtttaataagtttttctttaattactgtggaataacgtgccagctatcatcaacacaatgattttgtacatagggtagggaagcagtgatgctctcaatgggaagatgtgcaacacaaattaaggggaactccatgtattttacctacttcagcaatggaactgcaacttggggctttgtgaataaaatttagctgccttgtatagtcgtttgaaagaatatgtgatctgtgagagaattatagtttttttttagaagaaaaatctgcaaaagatctttccaaagacaatgtgccacagatcttttgttctctgtaatgaggattaattgctgtttaaacaaaaatgtaattgttcatctttaaattctttccttttcataagaggatcaagctgtaaaaaaacaaaaaaattaataaaaatttcgagaaatcaaaaaaaaaaa

SEQ ID NO: 264 - protein, 1210 aa, Homo sapiens
MAAQSSLYNDDRNLLRIREKERRNQEAHQEKEAFPEKIPLFGEPYKTAKGDELSSRIQNMLGNYEEVKEFLSTKSHTHRLDASENRLGKPKYPLIPDKGSSIPSSSFHTSVHHQSIHTPASGPLSVGNISHNPKMAQPRTEPMPSLHAKSCGPPDSQHLTQDRLGQEGFGSSHHKKGDRRADGDHCASVTDSAPERELSPLISLPSPVPPLSPIHSNQQTLPRTQGSSKVHGSSNNSKGYCPAKSPKDLAVKVHDKETPQDSLVAPAQPPSQTFPPPSLPSKSVAMQQKPTAYVRPMDGQDQAPSESPELKPLPEDYRQQTFEKTDLKVPAKAKLTKLKMPSQSVEQTYSNEVHCVEEILKEMTHSWPPPLTAIHTPSTAEPSKFPFPTKDSQHVSSVTQNQKQYDTSSKTHSNSQQGTSSMLEDDLQLSDSEDSDSEQTPEKPPSSSAPPSAPQSLPEPVASAHSSSAESESTSDSDSSSDSESESSSSDSEENEPLETPAPEPEPPTTNKWQLDNWLTKVSQPAAPPEGPRSTEPPRRHPESKGSSDSATSQEHSESKDPPPKSSSKAPRAPPEAPHPGKRSCQKSPAQQEPPQRQTVGTKQPKKPVKASARAGSRTSLQGEREPGLLPYGSRDQTSKDKPKVKTKGRPRAAASNEPKPAVPPSSEKKKHKSSLPAPSKALSGPEPAKDNVEDRTPEHFALVPLTESQGPPHSGSGSRTSGCRQAVVVQEDSRKDRLPLPLRDTKLLSPLRDTPPPQSLMVKITLDLLSRIPQPPGKGSRQRKAEDKQPPAGKKHSSEKRSSDSSSKLAKKRKGEAERDCDNKKIRLEKEIKSQSSSSSSSHKESSKTKPSRPSSQSSKKEMLPPPPVSSSSQKPAKPALKRSRREADTCGQDPPKSASSTKSNHKDSSIPKQRRVEGKGSRSSSEHKGSSGDTANPFPVPSLPNGNSKPGKPQVKFDKQQADLHMREAKKMKQKAELMTDRVGKAFKYLEAVLSFIECGIATESESQSSKSAYSVYSETVDLIKFIMSLKSFSDATAPTQEKIFAVLCMRCQSILNMAMFRCKKDIAIKYSRTLNKHFESSSKVAQAPSPCIASTGTPSPLSPMPSPASSVGSQSSAGSVGSSGVAATISTPVTIQNMTSSYVTITSHVLTAFDLWEQAEALTRKNKEFFARLSTNVCTLALNSSLVDLVHYTRQGFQQLQELTKTP

SEQ ID NO: 265 - DNA, 1127 bp, Homo sapiens
accaaatcaaccataggtccaagaacaattgtctctggacggcagctatgcgactcaccgtgctgtgtgctgtgtgcctgctgcctggcagcctggccctgccgctgcctcaggaggcgggaggcatgagtgagctacagtgggaacaggctcaggactatctcaagagattttatctctatgactcagaaacaaaaaatgccaacagtttagaagccaaactcaaggagatgcaaaaattctttggcctacctataactggaatgttaaactcccgcgtcatagaaataatgcagaagcccagatgtggagtgccagatgttgcagaatactcactatttccaaatagcccaaaatggacttccaaagtggtcacctacaggatcgtatcatatactcgagacttaccgcatattacagtggatcgattagtgtcaaaggctttaaacatgtggggcaaagagatccccctgcatttcaggaaagttgtatggggaactgctgacatcatgattggctttgcgcgaggagctcatggggactcctacccatttgatgggccaggaaacacgctggctcatgcctttgcgcctgggacaggtctcggaggagatgctcacttcgatgaggatgaacgctggacggatggtagcagtctagggattaacttcctgtatgctgcaactcatgaacttggccattctttgggtatgggacattcctctgatcctaatgcagtgatgtatccaacctatggaaatggagatccccaaaattttaaactttcccaggatgatattaaaggcattcagaaactatatggaaagagaagtaattcaagaaagaaatagaaacttcaggcagaacatccattcattcattcattggattgtatatcattgttgcacaatcagaattgataagcactgttcctccactccatttagcaattatgtcacccttttttattgcagttggtttttgaatgtctttcactccttttattggttaaactcctttatggtgtgactgtgtcttattccatctatgagctttgtcagtgcgcgtagatgtcaataaatgttacatacacaaataaataaaatgtttattccatggtaaattta

SEQ ID NO: 266 - protein, 267 aa, Homo sapiens
MRLTVLCAVCLLPGSLALPLPQEAGGMSELQWEQAQDYLKRFYLYDSETKNANSLEAKLKEMQKFFGLPITGMLNSRVIEIMQKPRCGVPDVAEYSLFPNSPKWTSKVVTYRIVSYTRDLPHITVDRLVSKALNMWGKEIPLHFRKVVWGTADIMIGFARGAHGDSYPFDGPGNTLAHAFAPGTGLGGDAHFDEDERWTDGSSLGINFLYAATHELGHSLGMGHSSDPNAVMYPTYGNGDPQNFKLSQDDIKGIQKLYGKRSNSRKK

SEQ ID NO: 267 - DNA, 1078 bp, Homo sapiens
aagaacaattgtctctggacggcagctatgcgactcaccgtgctgtgtgctgtgtgcctgctgcctggcagcctggccctgccgctgcctcaggaggcgggaggcatgagtgagctacagtgggaacaggctcaggactatctcaagagattttatctctatgactcagaaacaaaaaatgccaacagtttagaagccaaactcaaggagatgcaaaaattctttggcctacctataactggaatgttaaactcccgcgtcatagaaataatgcagaagcccagatgtggagtgccagatgttgcagaatactcactatttccaaatagcccaaaatggacttccaaagtggtcacctacaggatcgtatcatatactcgagacttaccgcatattacagtggatcgattagtgtcaaaggctttaaacatgtggggcaaagagatccccctgcatttcaggaaagttgtatggggaactgctgacatcatgattggctttgcgcgaggagctcatggggactcctacccatttgatgggccaggaaacacgctggctcatgcctttgcgcctgggacaggtctcggaggagatgctcacttcgatgaggatgaacgctggacggatggtagcagtctagggattaacttcctgtatgctgcaactcatgaacttggccattctttgggtatgggacattcctctgatcctaatgcagtgatgtatccaacctatggaaatggagatccccaaaattttaaactttcccaggatgatattaaaggcattcagaaactatatggaaagagaagtaattcaagaaagaaatagaaacttcaggcagaacatccattcattcattcattggattgtatatcattgttgcacaatcagaattgataagcactgttcctccactccatttagcaattatgtcacccttttttattgcagttggtttttgaatgtctttcactccttttattggttaaactcctttatggtgtgactgtgtcttattccatctatgagctttgtcagtgcgcgtagatgtcaataaatgttacatacacaaata

SEQ ID NO: 268 - DNA, 3275 bp, Homo sapiens
aacaaactgcacccactgaactccgcagctagcatccaaatcagcccttgagatttgaggccttggagactcaggagttttgagagcaaaatgacaacacccagaaattcagtaaatgggactttcctggcagagccaatgaaaggccctattgctatgcaatctggtccaaaaccactcttcaggaggatgtcttcactggtgggccccacgcaaagcttcttcatgagggaatctaagactttgggggctgtccagattatgaatgggctcttccacattgccctggggggtcttctgatgatcccagcagggatctatgcacccatctgtgtgactgtgtggtaccctctctggggaggcattatgtatattatttccggatcactcctggcagcaacggagaaaaactccaggaagtgtttggtcaaaggaaaaatgataatgaattcattgagcctctttgctgccatttctggaatgattctttcaatcatggacatacttaatattaaaatttcccattttttaaaaatggagagtctgaattttattagagctcacacaccatatattaacatatacaactgtgaaccagctaatccctctgagaaaaactccccatctacccaatactgttacagcatacaatctctgttcttgggcattttgtcagtgatgctgatctttgccttcttccaggaacttgtaatagctggcatcgttgagaatgaatggaaaagaacgtgctccagacccaaatctaacatagttctcctgtcagcagaagaaaaaaaagaacagactattgaaataaaagaagaagtggttgggctaactgaaacatcttcccaaccaaagaatgaagaagacattgaaattattccaatccaagaagaggaagaagaagaaacagagacgaactttccagaacctccccaagatcaggaatcctcaccaatagaaaatgacagctctccttaagtgatttcttctgttttctgtttccttttttaaacattagtgttcatagcttccaagagacatgctgactttcatttcttgaggtactctgcacatacgcaccacatctctatctggcctttgcatggagtgaccatagctccttctctcttacattgaatgtagagaatgtagccattgtagcagcttgtgttgtcacgcttcttcttttgagcaactttcttacactgaagaaaggcagaatgagtgcttcagaatgtgatttcctactaacctgttccttggataggctttttagtatagtatttttttttgtcattttctccatcarcaaccagggagactgcacctgatggaaaagatatatgactgcttcatgacattcctaaactatcttttttttattccacatctacgtttttggtggagtcccttttgcatcattgttttaaggatgataaaaaaaaataacaactagggacaatacagaacccattccatttatctttctacagggctgacattgtggcacattcttagagttaccacaccccatgagggaagctctaaatagccaacacccatctgttttttgtaaaaacagcatagcttatacatggacatgtctctgccttaacttttcctaactcccactctaggctattgtttgcatgtctacctacttttagccattatgcgagaaaagaaaaaaatgaccatagaaaatgccaccatgaggtgcccaaatttcaaataataattaacatttagttatatttataatttccagatgacaaagtatttcatcaaataacttcatttgatgttccatgatcaagaaagaatccctatctctattttacaagtaattcaaagaggccaaataacttgtaaacaagaaaaggtaacttgtcaacagtcataactagtaattatgagagccttgtttcataaccaggtcttcttactcaaatcctgtgatgtttgaaataaccaaattgtctctccaatgtctgcataaactgtgagagccaagtcaacagcttttatcaagaatttactctctgaccagcaataaacaagcactgagagacacagagagccagattcagattttacccatggggataaaaagactcagactttcaccacatttggaaaactacttgcatcataaatatataataactggtagtttatatgaagcagacactaagtgctatagacactctcagaatatcatacttggaaacaatgtaattaaaatgccgaatctgagtcaacagctgccctacttttcaattcagatatactagtaccttacctagaaataatgttaacctagggtgaagtcactataatctgtagtctattatttgggcatttgctacatgatgagtgctgccagattgtggcaggtaaagagacaatgtaatttgcactccctatgatatttctacatttttagcgaccactagtggaagacattccccaaaattagaaaaaaaggagatagaagatttctgtctatgtaaagttctcaaaatttgttctaaattaataaaactatctttgtgttcttttctgcaacagatgattccaacatgggtgtttgtctattcttctttactcttgaaacattagaccatgggaggctcttacagccttgagttgatatttatacaacccaaatctaggtttgaacggtgaggtgtcaggtcatcaaatattcatgtctatatagtcttacacaggttctcaaaaaaaatgttcatgggataggtcattgataatggattccttattctgagaactccagacgactgaaatatatgagagaaggaaaaggacatagtaggagcaggcctgagaaaaaaatgaaagtcagaaatctttaaaaaaatacaagatcttatttctatcttattttttctcctcttctgaaatatatatgaggattcctctccaaacccatggtttctctaagaattttgagtcatttgtatgacctcaaataattagttttagctgacctcacataactccttataataggagacatctttaatgtctgctattaaagaaggatgaaaattcctatgaccttctccccgattatccctttggcaatatagagtcaaataataacattgaccaatagtaaacatgctttgccaagaagtagaagatatattctctagccttagtttttcctcccaatttgcatttttgtaaaaataatgttgtatccacaaaggaaataaactttaaaaacccaagtgcactcattg

SEQ ID NO: 269 - protein, 297 aa, Homo sapiens [sequence omitted]

SEQ ID NO: 270 - DNA, 571 bp, Homo sapiens
gtacctgtctataaggagtcctgcttatcacaatgaatgttctcctgggcagcgttgtgatctttgccaccttcgtgactttatgcaatgcatcatgctatttcatacctaatgagggagttccaggagattcaaccaggaaatgcatggatctcaaaggaaacaaacacccaataaactcggagtggcagactgacaactgtgagacatgcacttgctacgaaacagaaatttcatgttgcacccttgtttctacacctgtgggttatgacaaagacaactgccaaagaatcttcaagaaggaggactgcaagtatatcgtggtggagaagaaggacccaaaaaagacctgttctgtcagtgaatggataatctaatgtgcttctagtaggcacagggctcccaggccaggcctcattctcctctggcctctaatagtcaatgattgtgtagccatgcctatcagtaaaaagatttttgagcaaacacttgaatatgtgtgtccttttaatttataatttatgtatgcattgatttaatacacattataaagaatacaaacatttaaaaa

SEQ ID NO: 271 - protein, 114 aa, Homo sapiens
MNVLLGSVVIFATFVTLCNASCYFIPNEGVPGDSTRKCMDLKGNKHPINSEWQTDNCETCTCYETEISCCTLVSTPVGYDKDNCQRIFKKEDCKYIVVEKKDPKKTCSVSEWII

SEQ ID NO: 272 - DNA, 5212 bp, Homo sapiens
cttcactggccctcatcacttctcaccgcgccctccagcttcacccgtacaggtagccccgccgccgcgcacctgccttcgctcccgcaccggtgacagtggatagtggaaacaggagatcgtggatcctccttcaaaaatggaggatggaaagcccgtttgggcgccacaccctacagatggatttcagatgggcaatattgtggatattggccccgacagcttaacaattgaacccttgaatcagaaaggcaagacatttttggctctcataaaccaagtgtttcctgcagaagaggacagtaaaaaagatgtggaagataactgttcactaatgtatttaaatgaagccacactgctccataatatcaaagttcgatatagtaaagacagaatttatacatatgtcgccaacattctgattgcagtgaatccatactttgacatacctaaaatatattcttcagaagcaataaagtcatatcaaggaaaatctcttgggacaagaccacctcatgtctttgcaattgctgataaagcttttcgagacatgaaggtgctcaagatgagtcagtctatcattgtatctggagaatcaggagccggcaaaacagaaaatacaaaatttgttctaagatacctgactgaatcctatggaacaggtcaagatattgatgacagaattgttgaagctaacccactcctagaagcctttggaaatgcgaagactgttcgcaacaataatagcagtcgatttgggaaatttgtagaaatacattttaatgaaaagagctcagttgttggaggatttgtttcacattatctcctagagaaatctaggatctgtgttcaaggcaaagaggaaagaaattatcatatcttttataggttgtgtgctggtgcttctgaagatattagagaaaaacttcatttgagttcaccagataattttcggtatttaaaccgaggctgcactagatactttgctaacaaagaaactgacaaacagattttacagaaccgcaaaagtcctgagtaccttaaggcaggttctatgaaagatcctctgctagatgaccatggtgattttattagaatgtgcacggctatgaaaaaaattggtttggatgatgaagaaaagcttgatctcttccgggtagtagctggcgtcctgcaccttggaaatattgattttgaggaagctggcagcacttcaggtggttgtaatctgaagaataaatctgctcagtctttggaatattgtgctgaattactgggtttggaccaagatgatcttcgagtaagtttgaccacaagagtcatgctaacaacagcagggggcaccaaaggaacagttataaaggtacctctgaaagtggagcaagcaaacaatgctcgtgatgccctggcaaagacagtgtatagccatctttttgatcatgtggtaaacagagtaaatcagtgttttccttttgaaacatcatcctattttattggagtcctagatattgctggttttgagtactttgagcataacagttttgaacaattttgcatcaactattgcaatgaaaaacttcaacaattttttaatgaaaggattctgaaggaggaacaagaactctatcaaaaagaaggtttaggtgttaatgaagtgcattatgtggataatcaggactgtatagatttaattgaagccaaattagtgggaatactggatattttggatgaagaaaatcgccttccccagccaagtgatcaacactttacatctgcagttcaccaaaagcacaaggatcattttcgactcactattcccagaaaatctaagctggcagttcataggaatatcagagacgacgaaggcttcattatcaggcattttgcgggggcagtgtgctatgaaacaacccagtttgtggagaaaaataatgatgctttacatatgtctcttgaatccttaatatgtgaatccagagataagtttatacgggaattatttgaatcatccacaaataacaacaaagatactaaacaaaaagcaggaaaacttagcttcatcagcgtgggaaacaagtttaagacacagttaaatttgcttctggataaacttcgaagtactggagcaagctttattcgttgcatcaaacctaacttaaagatgacaagccaccactttgaaggtgctcaaattctgtctcagcttcagtgttcagggatggtgtctgttttggacttgatgcagggtggttacccatcacgagcttcatttcatgaactctacaacatgtacaaaaagtatatgccagataaacttgcaagattggatccaagactattttgtaaggctttgtttaaagctttgggcttaaatgaaaatgactacaagtttgggttaaccaaagtattttttagacctggcaagtttgcagaatttgatcagatcatgaagtctgaccctgaccacttagcagagttggttaaaagagtcaatcactggctcacatgcagtcgctggaagaaagttcagtggtgctcactctcagtcatcaaattgaaaaacaaaataaaatatcgagctgaagcctgcattaaaatgcaaaaaactattcgaatgtggctttgcaagaggagacacaaacctcgcattgatggtctggttaaggtgggcacactgaaaaaacgacttgataaatttaatgaggtagtcagtgtgttgaaagatggaaaacccgagatgaataaacagatcaagaatctggaaatttctattgatactttgatggccaaaattaagtccactatgatgacgcaggaacaaatccagaaagaatatgatgcactggttaaaagctcagaggaactcctcagtgcattacagaaaaaaaaacagcaggaagaggaagcagaaaggctgaggcgtattcaagaagaaatggaaaaggaaagaaaaagacgtgaagaagacgaaaaacgtcgaagaaaggaagaggaggaaaggcggatgaaacttgagatggaagcaaagagaaaacaagaagaagaagagagaaagaaaagggaagatgatgaaaaacgcattcaagctgaagtggaggcacagctggcccgacagaaggaggaggaatcccaacagcaagcagttctggagcaggagcgcagggaccgggagctggccctgaggattgcccagagtgaagccgagctcatcagtgatgaggcccaggccgacctggcgctgcggagaaatgatggaacaagacccaaaatgacaccggaacaaatggccaaagaaatgtcagaatttttgagtagaggtcctgctgtactagccaccaaagcagctgctggtactaagaaatatgatcttagtaaatggaaatatgcagaactacgtgataccatcaatacttcttgtgatattgagctcctggcagcttgcagagaagaatttcataggagactaaaagtgtatcatgcttggaaatctaagaacaagaagagaaatactgaaacagagcaacgtgctccaaagtctgttactgattatgattttgcaccatttttgaacaattcacctcagcaaaacccagcagctcagattcctgccaggcagcgggagattgaaatgaaccgacagcaacgcttcttccgcatcccattcatccgccctgccgaccagtacaaagaccctcagagtaagaaaaaaggctggtggtatgcccattttgatggaccatggattgcccggcaaatggaactccatcctgacaagccacccatcctacttgtggctggtaaggacgacatggagatgtgtgagctgaatcttgaggagactggcctgactcggaagcgtggtgctgagatcttgccaagacagtttgaagaaatctgggaacgctgtggaggcatccagtaccttcagaatgcgattgagagcagacaggctcggcccacctatgcaacagccatgctgcagagtctgttaaagtagatgttgcacactagccttacagctgggagcctttgccatggtacttaggtagggtgtgtgcccccagatttaaccattccataatcatgttagagttacttctataaagtgaacagattttattaatcacggcttttggtgaatttgtttaaggttaattatggtagcaaattttggacctaaacattatttttctgtatcccgctgtaattcccaaaactctcattattctctaactattacacatgggcatattctgatgtttctcatcctttgccagaagactaccttacatccatcgtaattgttctctaggaaaagagaacttttttcaaaattcaaaatactttttaaggatggcacagtaccatataactggagtaataaaacatgagcttacattcttacaataactaaaccacttaaaatgatcaaggcactaatgttttggtctgaaaagctgtgtactttatagacattttcagacatttttggaaatttccattaaaggtggaaaatctatttttttcctcctttgcagtgtcttagtttgaatgaaacacttcgaagttctagaattctagaaagagccttaatgtatttgatgtattctgtgataagaggtactaatagtatccagcacagatttgcttttctttgctagcacaatgtgtgttgctgtcagaatattctttttatattctgtggaaaaataaaggaaattcagattgtttaaatgcctaaaagttttgagataagttttgtttcaattagaaaaggaaataggttttaggtggcatagtggcttaactggactgaattcaaatattctttcaacttcatctcaatagtgatttttgtatcagaatcttgtccaagttgtttcattgatttagtaagtgttctgcttccaacatctttctttttaagaaattcctagtgtcttttttggcctttgaggttttggtaattgtagacctgtttcataagctttgtaattcagaaatccttgtatttagtaagtgcttgttttacataactgataattttaaaatgttttctttgtgtgctgttagtattgattcaaatgtcagcagctttaagcctaatatttatgactttcacatttggaatttaaagacaaaaatacatcaaggagttatgctgacataattctaaggagttttgttgtattttagaataaaattataaagt

SEQ ID NO: 273 - protein, 1285 aa, Homo sapiens
MEDGKPVWAPHPTDGFQMGNIVDIGPDSLTIEPLNQKGKTFLALINQVFPAEEDSKKDVEDNCSLMYLNEATLLHNIKVRYSKDRIYTYVANILIAVNPYFDIPKIYSSEAIKSYQGKSLGTRPPHVFAIADKAFRDMKVLKMSQSIIVSGESGAGKTENTKFVLRYLTESYGTGQDIDDRIVEANPLLEAFGNAKTVRNNNSSRFGKFVEIHFNEKSSVVGGFVSHYLLEKSRICVQGKEERNYHIFYRLCAGASEDIREKLHLSSPDNFRYLNRGCTRYFANKETDKQILQNRKSPEYLKAGSMKDPLLDDHGDFIRMCTAMKKIGLDDEEKLDLFRVVAGVLHLGNIDFEEAGSTSGGCNLKNKSAQSLEYCAELLGLDQDDLRVSLTTRVMLTTAGGTKGTVIKVPLKVEQANNARDALAKTVYSHLFDHVVNRVNQCFPFETSSYFIGVLDIAGFEYFEHNSFEQFCINYCNEKLQQFFNERILKEEQELYQKEGLGVNEVHYVDNQDCIDLIEAKLVGILDILDEENRLPQPSDQHFTSAVHQKHKDHFRLTIPRKSKLAVHRNIRDDEGFIIRHFAGAVCYETTQFVEKNNDALHMSLESLICESRDKFIRELFESSTNNNKDTKQKAGKLSFISVGNKFKTQLNLLLDKLRSTGASFIRCIKPNLKMTSHHFEGAQILSQLQCSGMVSVLDLMQGGYPSRASFHELYNMYKKYMPDKLARLDPRLFCKALFKALGLNENDYKFGLTKVFFRPGKFAEFDQIMKSDPDHLAELVKRVNHWLTCSRWKKVQWCSLSVIKLKNKIKYRAEACIKMQKTIRMWLCKRRHKPRIDGLVKVGTLKKRLDKFNEVVSVLKDGKPEMNKQIKNLEISIDTLMAKIKSTMMTQEQIQKEYDALVKSSEELLSALQKKKQQEEEAERLRRIQEEMEKERKRREEDEKRRRKEEEERRMKLEMEAKRKQEEEERKKREDDEKRIQAEVEAQLARQKEEESQQQAVLEQERRDRELALRIAQSEAELISDEAQADLALRRNDGTRPKMTPEQMAKEMSEFLSRGPAVLATKAAAGTKKYDLSKWKYAELRDTINTSCDIELLAACREEFHRRLKVYHAWKSKNKKRNTETEQRAPKSVTDYDFAPFLNNSPQQNPAAQIPARQREIEMNRQQRFFRIPFIRPADQYKDPQSKKKGWWYAHFDGPWIARQMELHPDKPPILLVAGKDDMEMCELNLEETGLTRKRGAEILPRQFEEIWERCGGIQYLQNAIESRQARPTYATAMLQSLLK

SEQ ID NO: 274 - DNA, 4879 bp, Homo sapiens
gcccgggtgggtggctgcgcagggccctacctgggcgggagcggctgcagagccctgtccacgcggtgcctccccagcacggcacctcccactccaggctgttggttacctggccgggagctggcagagaccaggatttctcctcgccgccgttgctgttgttaggggaaacagaccatctgcatctagacctgcctctctctccgctccccacttcagacgagctcttcctgcctggaatctgtgatccgtatgtgaaactttcattgtacgtagcggatgagaatagagaacttgctttggtccagacaaaaacaattaaaaagacactgaacccaaaatggaatgaagaattttatttcagggtaaacccatctaatcacagactcctatttgaagtatttgacgaaaatagactgacacgagacgacttcctgggccaggtggacgtgccccttagtcaccttccgacagaagatccaaccatggagcgaccctatacatttaaggactttctcctcagaccaagaagtcataagtctcgagttaagggatttttgcgattgaaaatggcctatatgccaaaaaatggaggtcaagatgaagaaaacagtgaccagagggatgacatggagcatggatgggaagttgttgactcaaatgactcggcttctcagcaccaagaggaacttcctcctcctcctctgcctcccgggtgggaagaaaaagtggacaatttaggccgaacttactatgtcaaccacaacaaccggaccactcagtggcacagaccaagcctgatggacgtgtcctcggagtcggacaataacatcagacagatcaaccaggaggcagcacaccggcgcttccgctcccgcaggcacatcagcgaagacttggagcccgagccctcggagggcggggatgtccccgagccttgggagaccatttcagaggaagtgaatatcgctggagactctctcggtctggctctgcccccaccaccggcctccccaggatctcggaccagccctcaggagctgtcagaggaactaagcagaaggcttcagatcactccagactccaatggggaacagttcagctctttgattcaaagagaaccctcctcaaggttgaggtcatgcagtgtcaccgacgcagttgcagaacagggccatctaccaccgccatcagtggcctatgtacataccacgccgggtctgccttcaggctgggaagaaagaaaagatgctaaggggcgcacatactatgtcaatcataacaatcgaaccacaacttggactcgacctatcatgcagcttgcagaagatggtgcgtccggatcagccacaaacagtaacaaccatctaatcgagcctcagatccgccggcctcgtagcctcagctcgccaacagtaactttatctgccccgctggagggtgccaaggactcacccgtacgtcgggctgtgaaagacaccctttccaacccacagtccccacagccatcaccttacaactcccccaaaccacaacacaaagtcacacagagcttcttgccacccggctgggaaatgaggatagcgccaaacggccggcccttcttcattgatcataacacaaagactacaacctgggaagatccacgtttgaaatttccagtacatatgcggtcaaagacatctttaaaccccaatgaccttggcccccttcctcctggctgggaagaaagaattcacttggatggccgaacgttttatattgatcataatagcaaaattactcagtgggaagacccaagactgcagaacccagctattactggtccggctgtcccttactccagagaatttaagcagaaatatgactacttcaggaagaaattaaagaaacctgctgatatccccaataggtttgaaatgaaacttcacagaaataacatatttgaagagtcctatcggagaattatgtccgtgaaaagaccagatgtcctaaaagctagactgtggattgagtttgaatcagagaaaggtcttgactatgggggtgtggccagagaatggttcttcttactgtccaaagagatgttcaacccctactacggcctctttgagtactctgccacggacaactacacccttcagatcaaccctaattcaggcctctgtaatgaggatcatttgtcctacttcacttttattggaagagttgctggtctggccgtatttcatgggaagctcttagatggtttcttcattagaccattttacaagatgatgttgggaaagcagataaccctgaatgacatggaatctgtggatagtgaatattacaactctttgaaatggatcctggagaatgaccctactgagctggacctcatgttctgcatagacgaagaaaactttggacagacatatcaagtggatttgaagcccaatgggtcagaaataatggtcacaaatgaaaacaaaagggaatatatcgacttagtcatccagtggagatttgtgaacagggtccagaagcagatgaacgccttcttggagggattcacagaactacttcctattgatttgattaaaatttttgacgaaaatgagctggagttgctcatgtgcggcctcggtgatgtggatgtgaatgactggagacagcattctatttacaagaacggctactgcccaaaccaccccgtcattcagtggttctggaaggctgtgctactcatggacgccgaaaagcgtatccggttactgcagtttgtcacagggacatcgcgagtacctatgaatggatttgccgaactttatggttccaatggtcctcagctgtttacaatagagcaatggggcagtcctgagaaactgcccagagctcacacatgctttaatcgccttgacttacctccatatgaaacctttgaagatttacgagagaaacttctcatggccgtggaaaatgctcaaggatttgaaggggtggattaagcaccctgtgcctcgggggtggttgttcttcaagcaagttctgcttgcacttttgcatttgcctaacagacttttgcagaggcgatggcagagagcagctgcaggcatggtccctggagccgagccttcaccacgcactcgtccaagttcggatgcgggaacctggtcccagcttgagttcctgcctttcccaccacaaattatcaactggttgatgtgtacactaattacatttcaggaggacttaatgctatttatgttgtgcctctgcaggcaaagcccttaataaatattttacatcctttctaatgacaatgaatggaattaatcactcaacaggtatagtattacgactcatgtttactttttaaaatgatttagaccgattttcagattttatttcgttatgattaaagatgtctcatgtacttggaaaagtgagcatttttttttttttttgtatttcactttcataccaggcttaatgtcaatgacatttttatttttgaagtactctgacacctccaccctctactttattagaattggaaggcaaatttttgtccaaaaacctacagacaagtactttgagagaatttccaatataatattagacataatgataattttttccatactcagaatgaaaaactggatattacgtttttgttttggggtttttttgtacaaatttagctaatagctacaggctgagagaattgtaacatagcatgacaaattttgtgttgacttgaaaggaatcacaccattattccttagaagtaattacatgtgttctaacacatttgagacagggttggactcccatttctcatccgagaaattacttaacccttcctggcgctgtacagtcatcttttattctatttcctctttgctgtttgtagtagagacattttgaatgaaacttggcactgcttgattcaaaactgtggaaaccagatctgtttagtctcctgtttgtatgcgtttgctaatggtagctaaataaccagtttttgttgtaaatgcaccaattctgaaggcactttatgtactacatggaggtcatatctggttttgtttttatttttttatcatgaacattaaatgtgatgatgatttcttttccctgcacacatctttccggtgcaatatctatcaattgtgaatctggctgctggtgtataaaaacctggatgtaaagctgagcctacagacctgtcctcaccaactgttttgtgatttctactcaactacaaagatttatttaatgtactcttaatctaactgagttttgttaccaatgacctgttgcatgcttcaataccgtgtactgcctgagttgtgcctcttgtgtgctagattaaaagtgagacagagacttgacttgatcctctgagctcaagctattgagctggtagtggcagaggactgagggtacctgcacagtttgattcttttccacgtgtaagtctccattgcagaattgtcgtgctttgagaaaacacctgaggcagtgtgggagttgaacgaccctgctgtcctttttaacctgtgttgtcctagaccctgtcggggcagtcaggggacactagagatttgatctcatgcgagtcatcaataggacaaaaaagttgtggtttggggaggtctgtttgttacataaaaaggacctttcggtgtaagaaattgccgtttttaccctgccctggctggcatgtgagaagccatggaaggttgtggttgtaaatgagttgtctaaaggggtgcagaggcctgaggtttctaaaagaaggtagatttctacagagctgagtgttggttcctttttcttattggttgaaaattacctggtagtgatcagaaaacttagatgctatgtaact

SEQ ID NO: 275 - protein, 995 aa, Homo sapiens
PGGWLRRALPGRERLQSPVHAVPPQHGTSHSRLLVTWPGAGRDQDFSSPPLLLLGETDHLHLDLPLSPLPTSDELFLPGICDPYVKLSLYVADENRELALVQTKTIKKTLNPKWNEEFYFRVNPSNHRLLFEVFDENRLTRDDFLGQVDVPLSHLPTEDPTMERPYTFKDFLLRPRSHKSRVKGFLRLKMAYMPKNGGQDEENSDQRDDMEHGWEVVDSNDSASQHQEELPPPPLPPGWEEKVDNLGRTYYVNHNNRTTQWHRPSLMDVSSESDNNIRQINQEAAHRRFRSRRHISEDLEPEPSEGGDVPEPWETISEEVNIAGDSLGLALPPPPASPGSRTSPQELSEELSRRLQITPDSNGEQFSSLIQREPSSRLRSCSVTDAVAEQGHLPPPSVAYVHTTPGLPSGWEERKDAKGRTYYVNHNNRTTTWTRPIMQLAEDGASGSATNSNNHLIEPQIRRPRSLSSPTVTLSAPLEGAKDSPVRRAVKDTLSNPQSPQPSPYNSPKPQHKVTQSFLPPGWEMRIAPNGRPFFIDHNTKTTTWEDPRLKFPVHMRSKTSLNPNDLGPLPPGWEERIHLDGRTFYIDHNSKITQWEDPRLQNPAITGPAVPYSREFKQKYDYFRKKLKKPADIPNRFEMKLHRNNIFEESYRRIMSVKRPDVLKARLWIEFESEKGLDYGGVAREWFFLLSKEMFNPYYGLFEYSATDNYTLQINPNSGLCNEDHLSYFTFIGRVAGLAVFHGKLLDGFFIRPFYKMMLGKQITLNDMESVDSEYYNSLKWILENDPTELDLMFCIDEENFGQTYQVDLKPNGSEIMVTNENKREYIDLVIQWRFVNRVQKQMNAFLEGFTELLPIDLIKIFDENELELLMCGLGDVDVNDWRQHSIYKNGYCPNHPVIQWFWKAVLLMDAEKRIRLLQFVTGTSRVPMNGFAELYGSNGPQLFTIEQWGSPEKLPRAHTCFNRLDLPPYETFEDLREKLLMAVENAQGFEGVD

SEQ ID NO: 276 - DNA, 3272 bp, Homo sapiens
gggcactgctttaaaactgggaaggaggaagacgaggccagggagccggagggtcaccaaggtagatttccagcagcgctagtccagctgaacactttccagccttgtttttcagcagctttgaggaaaagtatagtgatccgtatgtgaaactttcattgtacgtagcggatgagaatagagaacttgctttggtccagacaaaaacaattaaaaagacactgaacccaaaatggaatgaagaattttatttcagggtaaacccatctaatcacagactcctatttgaagtatttgacgaaaatagactgacacgagacgacttcctgggccaggtggacgtgccccttagtcaccttccgacagaagatccaaccatggagcgaccctatacatttaaggactttctcctcagaccaagaagtcataagtctcgagttaagggatttttgcgattgaaaatggcctatatgccaaaaaatggaggtcaagatgaagaaaacagtgaccagagggatgacatggagcatggatgggaagttgttgactcaaatgactcggcttctcagcaccaagaggaacttcctcctcctcctctgcctcccgggtgggaagaaaaagtggacaatttaggccgaacttactatgtcaaccacaacaaccggaccactcagtggcacagaccaagcctgatggacgtgtcctcggagtcggacaataacatcagacagatcaaccaggaggcagcacaccggcgcttccgctcccgcaggcacatcagcgaagacttggagcccgagccctcggagggcggggatgtccccgagccttgggagaccatttcagaggaagtgaatatcgctggagactctctcggtctggctctgcccccaccaccggcctccccaggatctcggaccagccctcaggagctgtcagaggaactaagcagaaggcttcagatcactccagactccaatggggaacagttcagctctttgattcaaagagaaccctcctcaaggttgaggtcatgcagtgtcaccgacgcagttgcagaacagggccatctaccaccgcccagtgccccagctgggagagcgcgttcatcaactgtcacgggtggtgaggaaccaacgccatcagtggcctatgtacataccacgccgggtctgccttcaggctgggaagaaagaaaagatgctaaggggcgcacatactatgtcaatcataacaatcgaaccacaacttggactcgacctatcatgcagcttgcagaagatggtgcgtccggatcagccacaaacagtaacaaccatctaatcgagcctcagatccgccggcctcgtagcctcagctcgccaacagtaactttatctgccccgctggagggtgccaaggactcacccgtacgtcgggctgtgaaagacaccctttccaacccacagtccccacagccatcaccttacaactcccccaaaccacaacacaaagtcacacagagcttcttgccacccggctgggaaatgaggatagcgccaaacggccggcccttcttcattgatcataacacaaagactacaacctgggaagatccacgtttgaaatttccagtacatatgcggtcaaagacatctttaaaccccaatgaccttggcccccttcctcctggctgggaagaaagaattcacttggatggccgaacgttttatattgatcataatagcaaaattactcagtgggaagacccaagactgcagaacccagctattactggtccggctgtcccttactccagagaatttaagcagaaatatgactacttcaggaagaaattaaagaaacctgctgatatccccaataggtttgaaatgaaacttcacagaaataacatatttgaagagtcctatcggagaattatgtccgtgaaaagaccagatgtcctaaaagctagactgtggattgagtttgaatcagagaaaggtcttgactatgggggtgtggccagagaatggttcttcttactgtccaaagagatgttcaacccctactacggcctctttgagtactctgccacggacaactacacccttcagatcaaccctaattcaggcctctgtaatgaggatcatttgtcctacttcacttttattggaagagttgctggtctggccgtatttcatgggaagctcttagatggtttcttcattagaccattttacaagatgatgttgggaaagcagataaccctgaatgacatggaatctgtggatagtgaatattacaactctttgaaatggatcctggagaatgaccctactgagctggacctcatgttctgcatagacgaagaaaactttggacagacatatcaagtggatttgaagcccaatgggtcagaaataatggtcacaaatgaaaacaaaagggaatatatcgacttagtcatccagtggagatttgtgaacagggtccagaagcagatgaacgcattcttggagggattcacagaactacttcctattgatttgattaaaatttttgatgaaaatgagctggagttgctcatgtgcggcctcggtgatgtggatgtgaatgactggagacagcattctatttacaagaacggctactgcccaaaccaccccgtcattcagtggttctggaaggctgtgctactcatggacgccgaaaagcgtatccggttactgcagtttgtcacagggacatcgcgagtacctatgaatggatttgccgaactttatggttccaatggtcctcagctgtttacaatagagcaatggggcagtcctgagaaactgcccagagctcacacatgctttaatcgccttgacttacctccatatgaaacctttgaagatttacgagagaaacttctcatggccgtggaaaatgctcaaggatttgaaggggtggattaagcaccctgtacctcgggggtggttgttcttcaagcaagttctgcttgcacttttgcatttgcctaacagacttttgcagaggcgatggcagagagcagctgcaggcatggtccctggagccgagccttcaccacgcactcgtccaagttcggatgcgggaacctggtcccagcttgagttcctgcctttcccaccacaaattatcaactggttgatgtgtacactaattacatttcaggaggacttaatgctatttatgttgtgcctctgcaggcaaagcccttaataaatattttacatccttaaaaaaaaaaaaaaaaaaaaaaaaaa

SEQ ID NO: 277 - protein, 854 aa, Homo sapiens
MERPYTFKDFLLRPRSHKSRVKGFLRLKMAYMPKNGGQDEENSDQRDDMEHGWEVVDSNDSASQHQEELPPPPLPPGWEEKVDNLGRTYYVNHNNRTTQWHRPSLMDVSSESDNNIRQINQEAAHRRFRSRRHISEDLEPEPSEGGDVPEPWETISEEVNIAGDSLGLALPPPPASPGSRTSPQELSEELSRRLQITPDSNGEQFSSLIQREPSSRLRSCSVTDAVAEQGHLPPPSAPAGRARSSTVTGGEEPTPSVAYVHTTPGLPSGWEERKDAKGRTYYVNHNNRTTTWTRPIMQLAEDGASGSATNSNNHLIEPQIRRPRSLSSPTVTLSAPLEGAKDSPVRRAVKDTLSNPQSPQPSPYNSPKPQHKVTQSFLPPGWEMRIAPNGRPFFIDHNTKTTTWEDPRLKFPVHMRSKTSLNPNDLGPLPPGWEERIHLDGRTFYIDHNSKITQWEDPRLQNPAITGPAVPYSREFKQKYDYFRKKLKKPADIPNRFEMKLHRNNIFEESYRRIMSVKRPDVLKARLWIEFESEKGLDYGGVAREWFFLLSKEMFNPYYGLFEYSATDNYTLQINPNSGLCNEDHLSYFTFIGRVAGLAVFHGKLLDGFFIRPFYKMMLGKQITLNDMESVDSEYYNSLKWILENDPTELDLMFCIDEENFGQTYQVDLKPNGSEIMVTNENKREYIDLVIQWRFVNRVQKQMNAFLEGFTELLPIDLIKIFDENELELLMCGLGDVDVNDWRQHSIYKNGYCPNHPVIQWFWKAVLLMDAEKRIRLLQFVTGTSRVPMNGFAELYGSNGPQLFTIEQWGSPEKLPRAHTCFNRLDLPPYETFEDLREKLLMAVENAQGFEGVD

SEQ ID NO: 278 - DNA, 3074 bp, Homo sapiens
gcccgggtgggtggctgcgcagggccctacctgggcgggagcggctgcagagccctgtccacgcggtgcctccccagcacggcacctcccactccaggctgttggttacctggccgggagctggcagagaccaggatttctcctcgccgccgttgctgttgttaggggaaacagaccatctgcatctagacctgcctctctctccgctccccacttcagacgagctcttcctgcctggaatctgtgatccgtatgtgaaactttcattgtacgtagcggatgagaatagagaacttgctttggtccagacaaaaacaattaaaaagacactgaacccaaaatggaatgaagaattttatttcagggtaaacccatctaatcacagactcctatttgaagtatttgacgaaaatagactgacacgagacgacttcctgggccaggtggacgtgccccttagtcaccttccgacagaagatccaaccatggagcgaccctatacatttaaggactttctcctcagaccaagaagtcataagtctcgagttaagggatttttgcgattgaaaatggcctatatgccaaaaaatggaggtcaagatgaagaaaacagtgaccagagggatgacatggagcatggatgggaagttgttgactcaaatgactcggcttctcagcaccaagaggaacttcctcctcctcctctgcctcccgggtgggaagaaaaagtggacaatttaggccgaacttactatgtcaaccacaacaaccggaccactcagtggcacagaccaagcctgatggacgtgtcctcggagtcggacaataacatcagacagatcaaccaggaggcagcacaccggcgcttccgctcccgcaggcacatcagcgaagacttggagcccgagccctcggagggcggggatgtccccgagccttgggagaccatttcagaggaagtgaatatcgctggagactctctcggtctggctctgcccccaccaccggcctccccaggatctcggaccagccctcaggagctgtcagaggaactaagcagaaggcttcagatcactccagactccaatggggaacagttcagctctttgattcaaagagaaccctcctcaaggttgaggtcatgcagtgtcaccgacgcagttgcagaacagggccatctaccaccgggtgccaaggactcacccgtacgtcgggctgtgaaagacaccctttccaacccacagtccccacagccatcaccttacaactcccccaaaccacaacacaaagtcacacagagcttcttgccacccggctgggaaatgaggatagcgccaaacggccggcccttcttcattgatcataacacaaagactacaacctgggaagatccacgtttgaaatttccagtacatatgcggtcaaagacatctttaaaccccaatgaccttggcccccttcctcctggctgggaagaaagaattcacttggatggccgaacgttttatattgatcataatagcaaaattactcagtgggaagacccaagactgcagaacccagctattactggtccggctgtcccttactccagagaatttaagcagaaatatgactacttcaggaagaaattaaagaaacctgctgatatccccaataggtttgaaatgaaacttcacagaaataacatatttgaagagtcctatcggagaattatgtccgtgaaaagaccagatgtcctaaaagctagactgtggattgagtttgaatcagagaaaggtcttgactatgggggtgtggccagagaatggttcttcttactgtccaaagagatgttcaacccctactacggcctctttgagtactctgccacggacaactacacccttcagatcaaccctaattcaggcctctgtaatgaggatcatttgtcctacttcacttttattggaagagttgctggtctggccgtatttcatgggaagctcttagatggtttcttcattagaccattttacaagatgatgttgggaaagcagataaccctgaatgacatggaatctgtggatagtgaatattacaactctttgaaatggatcctggagaatgaccctactgagctggacctcatgttctgcatagacgaagaaaactttggacagacatatcaagtggatttgaagcccaatgggtcagaaataatggtcacaaatgaaaacaaaagggaatatatcgacttagtcatccagtggagatttgtgaacagggtccagaagcagatgaacgccttcttggagggattcacagaactacttcctattgatttgattaaaatttttgatgaaaatgagctggagttgctcatgtgcggcctcggtgatgtggatgtgaatgactggagacagcattctatttacaagaacggctactgcccaaaccaccccgtcattcagtggttctggaaggctgtgctactcatggacgccgaaaagcgtatccggttactgcagtttgtcacagggacatcgcgagtacctatgaatggatttgccgaactttatggttccaatggtcctcagctgtttacaatagagcaatggggcagtcctgagaaactgcccagagctcacacatgctttaatcgccttgacttacctccatatgaaacctttgaagatttacgagagaaacttctcatggccgtggaaaatgctcaaggatttgaaggggtggattaagcaccctgtgcctcgggggtggttgttcttcaagcaagttctgcttgcacttttgcatttgcctaacagacttttgcagaggcgatggcagagagcagctgcaggcatggtccctggagccgagccttcaccacgcactcgtccaagttcggatgcgggaacctggtcccagcttgagttcctgcctttcccaccacaaattatcaactggttgatgtgtacactaattacatttcaggaggacttaatgctatttatgttgtgcctctgcaggcaaagcccttaataaatattttacatccttaaaaaaaaaaaaaaaaaaaaaaaaaaaaaaaa

SEQ ID NO: 279 - protein, 911 aa, Homo sapiens
PGGWLRRALPGRERLQSPVHAVPPQHGTSHSRLLVTWPGAGRDQDFSSPPLLLLGETDHLHLDLPLSPLPTSDELFLPGICDPYVKLSLYVADENRELALVQTKTIKKTLNPKWNEEFYFRVNPSNHRLLFEVFDENRLTRDDFLGQVDVPLSHLPTEDPTMERPYTFKDFLLRPRSHKSRVKGFLRLKMAYMPKNGGQDEENSDQRDDMEHGWEVVDSNDSASQHQEELPPPPLPPGWEEKVDNLGRTYYVNHNNRTTQWHRPSLMDVSSESDNNIRQINQEAAHRRFRSRRHISEDLEPEPSEGGDVPEPWETISEEVNIAGDSLGLALPPPPASPGSRTSPQELSEELSRRLQITPDSNGEQFSSLIQREPSSRLRSCSVTDAVAEQGHLPPGAKDSPVRRAVKDTLSNPQSPQPSPYNSPKPQHKVTQSFLPPGWEMRIAPNGRPFFIDHNTKTTTWEDPRLKFPVHMRSKTSLNPNDLGPLPPGWEERIHLDGRTFYIDHNSKITQWEDPRLQNPAITGPAVPYSREFKQKYDYFRKKLKKPADIPNRFEMKLHRNNIFEESYRRIMSVKRPDVLKARLWIEFESEKGLDYGGVAREWFFLLSKEMFNPYYGLFEYSATDNYTLQINPNSGLCNEDHLSYFTFIGRVAGLAVFHGKLLDGFFIRPFYKMMLGKQITLNDMESVDSEYYNSLKWILENDPTELDLMFCIDEENFGQTYQVDLKPNGSEIMVTNENKREYIDLVIQWRFVNRVQKQMNAFLEGFTELLPIDLIKIFDENELELLMCGLGDVDVNDWRQHSIYKNGYCPNHPVIQWFWKAVLLMDAEKRIRLLQFVTGTSRVPMNGFAELYGSNGPQLFTIEQWGSPEKLPRAHTCFNRLDLPPYETFEDLREKLLMAVENAQGFEGVD

SEQ ID NO: 280 - DNA, 1831 bp, Homo sapiens
gccgcgccgcccgcacgtggcagccccaggccccggccccccacccacgtctgcgttgctgccccgcctgggccaggcccaaaggcaaggacaaagcagctgtcagggaacctccgccggagtcgaatttacgtgcagctgccggcaaccacaggttccaagatggtttgcgggggcttcgcgtgttccaagaactgcctgtgcgccctcaacctgctttacaccttggttagtctgctgctaattggaattgctgcgtggggcattggcttcgggctgatttccagtctccgagtggtcggcgtggtcattgcagtgggcatcttcttgttcctgattgctttagtgggtctgattggagctgtaaaacatcatcaggtgttgctatttttttatatgattattctgttacttgtatttattgttcagttttctgtatcttgcgcttgtttagccctgaaccaggagcaacagggtcagcttctggaggttggttggaacaatacggcaagtgctcgaaatgacatccagagaaatctaaactgctgtgggttccgaagtgttaacccaaatgacacctgtctggctagctgtgttaaaagtgaccactcgtgctcgccatgtgctccaatcataggagaatatgctggagaggttttgagatttgttggtggcattggcctgttcttcagttttacagagatcctgggtgtttggctgacctacagatacaggaaccagaaagacccccgcgcgaatcctagtgcattcctttgatgagaaaacaaggaagatttcctttcgtattatgatcttgttcactttctgtaattttctgttaagctccatttgccagtttaaggaaggaaacactatctggaaaagtaccttattgatagtggaattatatatttttactctatgtttctctacatgtttttttctttccgttgctgaaaaatatttgaaacttgtggtctctgaagctcggtggcacctggaatttactgtattcattgtcgggcactgtccactgtggcctttcttagcatttttacctgcagaaaaactttgtatggtaccactgtgttggttatatggtgaatctgaacgtacatctcactggtataattatatgtagcactgtgctgtgtagatagttcctactggaaaaagagtggaaatttattaaaatcagaaagtatgagatcctgttatgttaagggaaatccaaattcccaattttttttggtctttttaggaaagatgtgttgtggtaaaaagtgttagtataaaaatggataatttacttgtgtcttttatgattacaccaatgtattctagaaatagttatgtcttaggaaattgtggtttaatttttgacttttacaggtaagtgcaaaggagaagtggtttcatgaaatgttctaatgtataataacatttaccttcagcctccatcagaatggaacgagttttgagtaatcaggaagtatatctatatgatcttgatattgttttataataatttgaagtctaaaagactgcatttttaaacaagttagtattaatgcgttggcccacgtagcaaaaagatatttgattatcttaaaaattgttaaataccgttttcatgaaagttctcagtattgtaacagcaacttgtcaaacctaagcatatttgaatatgatctcccataatttgaaattgaaatcgtattgtgtggctctgtatattctgttaaaaaattaaaggacagaaacctttctttgtgtatgcatgtttgaattaaaagaaagtaatggaagaattgatcgatgaaaaaaaaaa

SEQ ID NO: 281 - protein, 204 aa, Homo sapiens
MVCGGFACSKNCLCALNLLYTLVSLLLIGIAAWGIGFGLISSLRVVGVVIAVGIFLFLIALVGLIGAVKHHQVLLFFYMIILLLVFIVQFSVSCACLALNQEQQGQLLEVGWNNTASARNDIQRNLNCCGFRSVNPNDTCLASCVKSDHSCSPCAPIIGEYAGEVLRFVGGIGLFFSFTEILGVWLTYRYRNQKDPRANPSAFL

SEQ ID NO: 282 - DNA, 3266 bp, Homo sapiens
gcggtgcgggccgggcgggtgcattcaggccaaggcggggccgccgggatgctcagggttccggagccgcggcccggggaggcgaaagcggagggggccgcgccgccgaccccgtccaagccgctcacgtccttcctcatccaggacatcctgcgggacggcgcgcagcggcaaggcggccgcacgagcagccagagacagcgcgacccggagccggagccagagccagagccagagggaggacgcagccgcgccggggcgcagaacgaccagctgagcaccgggccccgcgccgcgccggaggaggccgagacgctggcagagaccgagccagaaaggcacttggggtcttatctgttggactctgaaaacacttcaggcgcccttccaaggcttccccaaacccctaagcagccgcagaagcgctcccgagctgccttctcccacactcaggtgatcgagttggagaggaagttcagccatcagaagtacctgtcagcccctgaacgggcccacctggccaagaacctcaagctcacggagacccaagtgaagatatggttccagaacagacgctataagactaagcgaaagcagctctcctcggagctgggagacttggagaagcactcctctttgccggccctgaaagaggaggccttctcccgggcctccctggtctccgtgtataacagctatccttactacccatacctgtactgcgtgggcagctggagcccagctttttggtaatgccagctcaggtgacaaccattatgatcaaaaactgccttccccagggtgtctcatatgaaaagcacaaggggccaaggtcagggagcaagaggtgtgcacaccaaaactattggagaattgcgtggaaatcttcagattcttcactggtgagacaatgaaacaacagagacagtgaaagttttaatacctaagtcattcccccagtgcatactgtagcgtcaagtttttgcttctggctacctgtttgaaggggagagagggaaaatcaagtggtattttccagcactttgtatgattttggatgagctgtacacccaaggattctgttctgcaactccatcctcctgtgtcactgaatatcaactctgaaagagcaaacctaacaggagaaaggacaaccaggatgaggatgtcaccaactgaattaaacttaagtccagaagcctcctgttggccttggaatatggccaaggctctctctgtccctgtaaaagagaggggcaaatagtctccaaagagaacgccctcatgctcagcacatatttgcatggaagggggagatgggtgggaggagatgaaaatatcagcttttcttattcctttttattccttttaaaatggtatgccaacttaagtatttacagggtggcccaaatagaacaagatgcactcgctgtgattttaagacaagctgtataaacagaactccactgcaagagggagggccgggccaggagaatctccgcttgtccaagacaggggcctaaggagggtctccacactgctgctaggggctgttgcatttttttattagtagaaagtggaaaggcctcttctcaacttttttcccttgggctggagaatttagaatcagaagtttcctggagttttcaggctatcatatatactgtatcctgaaaggcaacataattcttccttccctccttttaaaattttgtgttcctttttgcagcaattactcactaaagggcttcattttagtccagatttttagtctggctgcacctaacttatgcctcgcttatttagcccgagatccggtctttttttttttttttttttccgtctccccaaagctttatctgtcttgactttttaaaaaagtttgggggcagattctgaattggctaaaagacatgcatttttaaaactagcaactcttatttctttcctttaaaaatacatagcattaaatcccaaatcctatttaaagacctgacagcttgagaagggtcactactgcatttataggaccttctggtggttctgctgttacgtttgaagtctgacaatccttgagaatctttgcatgcagaggaggtaagaggtattggattttcacagagggaagaacacagcgcagaatgaaggcgcaggcttactgagctgtccagtggagggctcatgggtgggacatggaaaagaaggcagcctaggccctggggagcccagtccactgagcaagcaagggactgagtgagccttttgcaggaaaaggctaagaaaaaggaaaaccattctaaaacacaacaagaaactgtccaaatgctttgggaactgtgtttattgcctataatggggtccccaaaatgggtaacctagacttcagagagaatgagcagagagcaaaggagaaatctgggctgtccttccattttcattctgttatctcaggtgagctggtagaggggagacattagaaaaaaatgaaacaacaaaacaattactaatgaggtacgctgaggcctgggagtctcttgagctccacgacttcaaaattaaaatgagccatgagtcaaaccactgcaatccagcctgggcaacgagcaagacccagtctctactgttggtggcaaaattgccaacataagttaatagaaagttggccaatttcaccccattttctgtggtttgggctccacattgcaatgttcaatgccacgtgctgctgacaccgaccggagtactagccagcacaaaaggcagggtagcctgaattgctttctgctctttacatttcttttaaaataagcatttagtgctcagtccctactgagtactctttctctcccctcctctgaatttaattctttcaacttgcaatttgcaagggttacacatttcactgtgatgtatattgtgttgcaaaaaaaaaaaagtgtctttgtttaaaattacttggtttgtgaatccatcttgctttccccattggaactagtcattaacccatctctgaactggtagaaaaacatctgaagagctagtctatcagcatctgacaggtgaattggatggttctcagaaccatttcacccagacagcctgtttctatcctgtttaataaattagtttgggttctctacatgcataacaaaccctgctccaatctgtcacataaaagtctgtgacttgaagtttagtcagcacccccaccaaactttatttttctatgtgttttttgcaacatatgagtgttttgaaaataaagt

SEQ ID NO: 283 - protein, 234 aa, Homo sapiens
MLRVPEPRPGEAKAEGAAPPTPSKPLTSFLIQDILRDGAQRQGGRTSSQRQRDPEPEPEPEPEGGRSRAGAQNDQLSTGPRAAPEEAETLAETEPERHLGSYLLDSENTSGALPRLPQTPKQPQKRSRAAFSHTQVIELERKFSHQKYLSAPERAHLAKNLKLTETQVKIWFQNRRYKTKRKQLSSELGDLEKHSSLPALKEEAFSRASLVSVYNSYPYYPYLYCVGSWSPAFW

SEQ ID NO: 284 - DNA, 886 bp, Homo sapiens
gtcggttccgggcgttaccatcgtccgtgcgcaccgcccggcgtccaggtgagtctcccatctgcagagacgcggacgcgccggcccgcagttggcctgcggagcgcggtggacggtttggcgcccaccaggcgatcaatactttggatttttaatttctagatttggcaattcttcgctgaagtcatcatgagctttttccaactcctgatgaaaaggaaggaactcattcccttggtggtgttcatgactgtggcggcgggtggagcctcatctttcgctgtgtattctctttggaaaaccgatgtgatccttgatcgaaaaaaaaatccagaaccttgggaaactgtggaccctactgtacctcaaaagcttataacaatcaaccaacaatggaaacccattgaagagttgcaaaatgtccaaagggtgaccaaatgacgagccctcgcctctttcttctgaagagtactctataaatctagtggaaacatttctgcacaaactagattctggacaccagtgtgcggaaatgcttctgctacatttttagggtttgtctacattttttgggctctggataaggaattaaaggagtgcagcaataactgcactgtctaaaagtttgtgcttattttcttgtaaatttgaatattgcatattgaaatttttgtttatgatctatgaatgtttttcttaaaatttacaaagctttgtaaattagattttctttaataaaatgccatttgtgcaagatttctcaaagattaggtatatatttaaatggaagagaaaatatttttatgggagaaaaatacatttgaaccatgaaatttcatcttttaaataacatccagtacagatatctgtgtaaaaaaaaaaaaaa

SEQ ID NO: 285 - protein, 83 aa, Homo sapiens
MSFFQLLMKRKELIPLVVFMTVAAGGASSFAVYSLWKTDVILDRKKNPEPWETVDPTVPQKLITINQQWKPIEELQNVQRVTK

SEQ ID NO: 286 - DNA, 1005 bp, Homo sapiens
tgtgctgctattgtgtggatgccgcgcgtgtcttctcttctttccagagatggctaacaggggcccgagctatggcttaagccgagaggtgcaggagaagatcgagcagaagtatgatgcggacctggagaacaagctggtggactggatcatcctgcagtgcgccgaggacatagagcacccgccccccggcagggcccattttcagaaatggttaatggacgggacggtcctgtgcaagctgataaatagtttatacccaccaggacaagagcccatacccaagatctcagagtcaaagatggcttttaagcagatggagcaaatctcccagttcctaaaagctgcggagacctatggtgtcagaaccaccgacatctttcagacggtggatctatgggaagggaaggacatggcagctgtgcagaggaccctgatggctttaggcagcgttgcagtcaccaaggatgatggctgctatcggggagagccatcctggtttcacaggaaagcccagcagaatcggagaggcttttccgaggagcagcttcgccagggacagaacgtaataggcctgcagatgggcagcaacaagggagcctcccaggcgggcatgacagggtacgggatgcccaggcagatcatgttaggacgcggcatcctgcccctggtagagaggacgaatgttccacaccatggtctctacgaaaaagaaatagttagtcaccttctgaccttctcctctttctcaaagccttctgtccctggtttttgcaagtgctgcatttccgccgagaatccgcgttgcctactgctgccacctcctgttcatttagaactatgcaaagactccgcttccgttttcctgagctcctcgggccccagagtctctgtttgattatttatttatttatttatttatttgccaaaaattctcctcttcaacttatagaatgcacctaataaagtaattaagtcttgtggaaaaaaaaaaaaaaaaaaaaa

SEQ ID NO: 287 - protein, 282 aa, Homo sapiens
MANRGPSYGLSREVQEKIEQKYDADLENKLVDWIILQCAEDIEHPPPGRAHFQKWLMDGTVLCKLINSLYPPGQEPIPKISESKMAFKQMEQISQFLKAAETYGVRTTDIFQTVDLWEGKDMAAVQRTLMALGSVAVTKDDGCYRGEPSWFHRKAQQNRRGFSEEQLRQGQNVIGLQMGSNKGASQAGMTGYGMPRQIMLGRGILPLVERTNVPHHGLYEKEIVSHLLTFSSFSKPSVPGFCKCCISAENPRCLLLPPPVHLELCKDSASVFLSSSGPRVSV

SEQ ID NO: 288 - DNA, 417 bp, Homo sapiens
gcgcgccagccaccatgctaggtaacaagcgactggggctgtccggactcaccctggccctgtccctgctcgtgtgcctgggtgcgctggccgaggcgtacccctccaagccggacaacccgggcgaggacgcaccagcggaggacatggccagatactactcggcgctgcgacactacatcaacctcatcaccaggcagagatatggaaaacgatccagcccagagacactgatttcagacctcttgatgagagaaagcacagaaaatgttcccagaactcggcttgaagaccctgcaatgtggtgatgggaaatgagacttgctctctggcctttcctattttcagcccatatttcatcgtgtaaaacgagaatccacccatcctaccaatgcatgcagccactgtgctgaattc

SEQ ID NO: 289 - protein, 97 aa, Homo sapiens
MLGNKRLGLSGLTLALSLLVCLGALAEAYPSKPDNPGEDAPAEDMARYYSALRHYINLITRQRYGKRSSPETLISDLLMRESTENVPRTRLEDPAMW

SEQ ID NO: 290 - DNA, 2464 bp, Homo sapiens
cggaaacttgggggagtgcacagaagaacttcgggagcgcacgcgggaccagggaccaggctgagactcggggcgccagtccgggcaggggcagcgggacgcggccggagatgccctgtatccaagcccaatatgggacaccagcaccgagtccgggaccccgtgaccacctggcaagcgaccccctgacccctgagttcatcaagcccaccatggacctggccagccccgaggcagcccccgctgcccccactgccctgcccagcttcagcacgttcatggacggctacacaggagagtttgacaccttcctctaccagctgccaggaacagtccagccatgctcctcagcctcctcctcggcctcctccacatcctcgtcctcagccacctcccctgcctctgcctccttcaagttcgaggacttccaggtgtacggctgctaccccggccccctgagcggcccagtggatgaggccctgtcctccagtggctctgactactatggcagcccctgctcggccccgtcgccctccacgcccagcttccagccgccccagctctctccctgggatggctccttcggccacttctcgcccagccagacttacgaaggcctgcgggcatggacagagcagctgcccaaagcctctgggcccccacagcctccagccttcttttccttcagtcctcccactggccccagccccagcctggcccagagccccctgaagttgttcccctcacaggccacccaccagctgggggagggagagagctattccatgcctacggccttcccaggtttggcacccacttctccacaccttgagggctcggggatactggatacacccgtgacctcaaccaaggcccggagcggggccccaggtccaagtgaaggccgctgtgctgtgtgtggggacaacgcttcatgccagcattatggtgtccgcacatgtgagggctgcaagggcttcttcaagcgcacagtgcagaaaaacgccaagtacatctgcctggctaacaaggactgccctgtggacaagaggcggcgaaaccgctgccagttctgccgcttccagaagtgcctggcggtgggcatggtgaaggaagttgtccgaacagacagcctgaaggggcggcggggccggctaccttcaaaacccaagcagcccccagatgcctcccctgccaatctcctcacttccctggtccttgcacacctggattcagggcccagcactgccaaactggactactccaagttccaggagctggtgctgccccactttgggaaggaagatgctggggatgtacagcagttctacgacctgctctccggttctctggaggtcatccgaaagtgggcggagaagatccctggctttgctgagctgtcaccggctgaccaggacctgttgctggagtcggccttcctggagctcttcatcctccgcctggcgtacaggtctaagccaggcgagggcaagctcatcttctgctcaggcctggtgctacaccggctgcagtgtgcccgtggcttcggggactggattgacagtatcctggccttctcaaggtccctgcacagcttgcttgtcgatgtccctgccttcgcctgcctctctgcccttgtcctcatcaccgaccggcatgggctgcaggagccgcggcgggtggaggagctgcagaaccgcatcgccagctgcctgaaggagcacgtggcagctgtggcgggcgagccccagccagccagctgcctgtcacgtctgttgggcaaactgcccgagctgcggaccctgtgcacccagggcctgcagcgcatcttctacctcaagctggaggacttggtgccccctccacccatcattgacaagatcttcatggacacgctgcccttctgacccctgcctgggaacacgtgtgcacatgcgcactctcatatgccaccccatgtgcctttagtccacggacccccagagcacccccaagcctgggcttgagctgcagaatgactccaccttctcacctgctccaggaggtttgcagggagctcaagcccttggggagggggatgccttcatgggggtgaccccacgatttgtcttatcccccccagcctggccccggcctttatgttttttgtaagataaaccgtttttaacacatagcgccgtgctgtaaataagcccagtgctgctgtaaatacaggaagaaagagcttgaggtgggagcggggctgggaggaagggatgggccccgccttcctgggcagcctttccagcctcctgcctggctctctcttcctaccctccttccacatgtacataaactgtcactctaggaagaagacaaatgacagattctgacatttatatttgtgtattttcctggatttatagtatgtgacttttctgattaatatatttaatatattgaataaaaaatagacatgtagttg

SEQ ID NO: 291 - protein, 598 aa, Homo sapiens
MPCIQAQYGTPAPSPGPRDHLASDPLTPEFIKPTMDLASPEAAPAAPTALPSFSTFMDGYTGEFDTFLYQLPGTVQPCSSASSSASSTSSSSATSPASASFKFEDFQVYGCYPGPLSGPVDEALSSSGSDYYGSPCSAPSPSTPSFQPPQLSPWDGSFGHFSPSQTYEGLRAWTEQLPKASGPPQPPAFFSFSPPTGPSPSLAQSPLKLFPSQATHQLGEGESYSMPTAFPGLAPTSPHLEGSGILDTPVTSTKARSGAPGPSEGRCAVCGDNASCQHYGVRTCEGCKGFFKRTVQKNAKYICLANKDCPVDKRRRNRCQFCRFQKCLAVGMVKEVVRTDSLKGRRGRLPSKPKQPPDASPANLLTSLVLAHLDSGPSTAKLDYSKFQELVLPHFGKEDAGDVQQFYDLLSGSLEVIRKWAEKIPGFAELSPADQDLLLESAFLELFILRLAYRSKPGEGKLIFCSGLVLHRLQCARGFGDWIDSILAFSRSLHSLLVDVPAFACLSALVLITDRHGLQEPRRVEELQNRIASCLKEHVAAVAGEPQPASCLSRLLGKLPELRTLCTQGLQRIFYLKLEDLVPPPPIIDKIFMDTLPF

SEQ ID NO: 292 - DNA, 1586 bp, Homo sapiens
gaggacaggtttgtgcgctggacgcaagcaccaggcgcagcctcgctcgccgacacccggccagaacgtgttacgagtcagtttttagtgaaaaaacattgagctaggagccaagacccatctcttcactattttggtattgtgcaagtcatcttacctctctggatctcagttgtctcatctgtaaaaaggagataaaaattatttacctgcctgaacatgaggtggaggaccatcctgctacagtattgctttctcttgattacatgtttacttactgctcttgaagctgtgcctattgacatagacaagacaaaagtacaaaatattcaccctgtggaaagtgcgaagatagaaccaccagatactggactttattatgatgaatatctcaagcaagtgattgatgtgctggaaacagataaacacttcagagaaaagctccagaaagcagacatagaggaaataaagagtgggaggctaagcaaagaactggatttagtaagtcaccatgtgaggacaaaacttgatgaactgaaaaggcaagaagtaggaaggttaagaatgttaattaaagctaagttggattcccttcaagatataggcatggaccaccaagctcttctaaaacaatttgatcacctaaaccacctgaatcctgacaagtttgaatccacagatttagatatgctaatcaaagcggcaacaagtgatctggaacactatgacaagactcgtcatgaagaatttaaaaaatatgaaatgatgaaggaacatgaaaggagagaatatttaaaaacattgaatgaagaaaagagaaaagaagaagagtctaaatttgaagaaatgaagaaaaagcatgaaaatcaccctaaagttaatcacccaggaagcaaagatcaactaaaagaggtatgggaagagactgatggattggatcctaatgactttgaccccaagacatttttcaaattacatgatgtcaatagtgatggattcctggatgaacaagaattagaagccctatttactaaagagttggagaaagtatatgaccctaaaaatgaagaggatgatatggtagaaatggaagaagaaaggcttagaatgagggaacatgtaatgaatgaggttgatactaacaaagacagattggtgactctggaggagtttttgaaagccacagaaaaaaaagaattcttggagccagatagctgggagacattagatcagcaacagttcttcacagaggaagaactaaaagaatatgaaaatattattgctttacaagaaaatgaacttaagaagaaggcagatgagcttcagaaacaaaaagaagagctacaacgtcagcatgatcaactggaggctcagaagctggaatatcatcaggtcatacagcagatggaacaaaaaaaattacaacaaggaattcctccatcagggccagctggagaattgaagtttgagccacacatttaaagtctgaagtccaccagaacttggaagaaagctgttaactcaacatctatttcatctttttagctcccttcccttttctctgctcaataaatattttaaaagca

SEQ ID NO: 293 - protein, 420 aa, Homo sapiens
MRWRTILLQYCFLLITCLLTALEAVPIDIDKTKVQNIHPVESAKIEPPDTGLYYDEYLKQVIDVLETDKHFREKLQKADIEEIKSGRLSKELDLVSHHVRTKLDELKRQEVGRLRMLIKAKLDSLQDIGMDHQALLKQFDHLNHLNPDKFESTDLDMLIKAATSDLEHYDKTRHEEFKKYEMMKEHERREYLKTLNEEKRKEEESKFEEMKKKHENHPKVNHPGSKDQLKEVWEETDGLDPNDFDPKTFFKLHDVNSDGFLDEQELEALFTKELEKVYDPKNEEDDMVEMEEERLRMREHVMNEVDTNKDRLVTLEEFLKATEKKEFLEPDSWETLDQQQFFTEEELKEYENIIALQENELKKKADELQKQKEELQRQHDQLEAQKLEYHQVIQQMEQKKLQQGIPPSGPAGELKFEPHI

SEQ ID NO: 294 - DNA, 1811 bp, Homo sapiens
gagcgcgcggggtggggggggtcctggtctttggcttctcgactcggtcctgtttcgacagcgaacatgtcgcggcctgtcagaaataggaaggttgttgattactcacagtttcaggaatctgatgatgcagatgaagattatggaagagattcgggccctcccactaagaaaattcgatcatctccccgagaagctaaaaataagaggcgatctggaaagaattcacaggaagatagtgaggactcagaagacaaagatgtgaagaccaagaaggatgattctcactcagcagaggatagtgaagatgaaaaagaagatcataaaaatgtgcgccaacaacggcaggcggcatctaaagcagcttctaaacagagagagatgctcatggaagatgtgggcagtgaggaagaacaagaagaggaggatgaggcaccattccaggagaaagattccggcagcgatgaagatttcctaatggaagatgatgacgatagtgactatggcagttcgaaaaagaaaaacaaaaagatggttaagaagtccaaacctgaatgaaaagaaaagaaaatgcccaaacccagactaaaggctacagtgacgccaagtccagtgaaaggcaaagggaaagtgggtcgccccacagcttcaaaggcatcaaaggaaaagactccttctcccaaagaagaagatgaggaaccggaaagcctgccagaaaagaaaacatctacaagccccccacccgagaaatctggggatgaagggtctgaagatgaagccccttctggggaggattaaaagtgatgatggtctggggagagattttattaaaaaaaaaaagaaaaaaaaagaaaaaagagggaggaaaaaaaaagaacctacttaagatagaacatggttttggctatggcttgactcatgggctttcagtgcttttttccatttgtcgaaagtaacatttctctctctctctcttttttttttttttttttttaaagcaaaccattgtatgtgtaagtgtttaagttacctttttgtctattggtctctttgccagccctcccctttcccaatgaaagccatgtcaaattaatcactggattgactgcttcatctttttatttttaatgaaaggtgtaccacggttgtaaagcaataagatttgagatgaacactattgaaacttcgctttttgctaaaaaatagcaagttgaatagtaatcaaaaaacatagaaagattttagttcaaaatgattgctcctttctctacctggacttttaaaaaatcaattgtcatctaatatgagtttatttgtctatagacacaagtatcaatgtctaaaaaaaatcatgactttaaacttccaccgatgaggcaggtaggagataaagatgaattctgaactgttactaaaagtactcattttttaccttgtagggagggtgggcaatggggttacccgaccttatttgagggtatgggctttcttttttatttcatcacttgttatctcaaagagactcggagccagtgatccttttatcctgctacagtctttagggagctaaaaaaaaaaaaaaagcaggggctgccaaaactcttgatttcatatttccttctctaaatatatatgtatcctgttttttggataaaattttaccaagaatccaaaaaaaaaaaaaccctagaatttaatcaacaagatcagtctacaggtcacagtggatttcttttcaaactgacaatgtttaggttttaagcaaataaagttccagttaatgtgaaactcagaaaaaaaaaaaaaaaaaa

SEQ ID NO: 295 - protein, 163 aa, Homo sapiens
MSRPVRNRKVVDYSQFQESDDADEDYGRDSGPPTKKIRSSPREAKNKRRSGKNSQEDSEDSEDKDVKTKKDDSHSAEDSEDEKEDHKNVRQQRQAASKAASKQREMLMEDVGSEEEQEEEDEAPFQEKDSGSDEDFLMEDDDDSDYGSSKKKNKKMVKKSKPE

SEQ ID NO: 296 - DNA, 1334 bp, Homo sapiens
gagcccgcctctatgatgaagttcaagcccaaccagacgcggacctacgaccgcgagggcttcaagaagcgggcggcgtgcctgtgcttccggagcgagcaggaggacgaggtgctgctggtgagtagcagccggtacccagaccagtggattgtcccaggaggaggaatggaacccgaggaggaacctggcggtgctgccgtgagggaagtttatgaggaggctggagtcaaaggaaaactaggcagacttctgggcatatttgagaaccaagaccgaaagcacagaacatatgtttatgttctaacagtcactgaaatattagaagattgggaagattctgttaatattggaaggaagagagagtggttcaaagtagaagatgctatcaaagttctccagtgtcataaacctgtacatgcagagtatctggaaaagctaaagctgggttgttccccagccaatggaaattctacagtcccttcccttccggataataatgccttgtttgtaaccgctgcacagacctctgggttgccatctagtgtaagatagagagaactgggtaggcctctcccaccatgtgcagtctcatggggagaggcttctttcgtttcctcgtcaaacatctgattgacgcttgcaaactgtctgaatttgccatgcaaggttttcaaacaatttgcatgtttttcagatgctttcaaatctttttttaaaaaaatagtgtaaaatattttaataagccaaagccatgtggaatttttgtttagatgccttaactgtgccacaccccacaaccccctatattattttggttgtctatttctcacagcatattttcagttttttgtccatttgacatcagtctgtggtttattttgtcatcagattacttgtgggtatacctaccccaaaattgttttctcattcacagcattagcatattcagcaaatccatctgtggtgggaattaaaaatattattggtattaaagaaatccattcaccccaaaacttgttttacaggattacaattttaattcaaaatttccagatttgggctatttctgtatgatccaataacttattttgtcacagggcttaatttgccatttttggggatttgtcgactcattttgtctgaattttcacaactggtattatgtcactagctacctgatacggctatttcccttataactcaatagtaccttaacacaaagtataactctgtagagttggtgaatattttagggaaatattagcaaaatgcatgtagtaaagacatcttatgaaaactgtaaaaaaaaaaaaaaaaaaaaaaaaaaaaaa

SEQ ID NO: 297 - protein, 180 aa, Homo sapiens
MMKFKPNQTRTYDREGFKKRAACLCFRSEQEDEVLLVSSSRYPDQWIVPGGGMEPEEEPGGAAVREVYEEAGVKGKLGRLLGIFENQDRKHRTYVYVLTVTEILEDWEDSVNIGRKREWFKVEDAIKVLQCHKPVHAEYLEKLKLGCSPANGNSTVPSLPDNNALFVTAAQTSGLPSSVR

SEQ ID NO: 298 - DNA, 2370 bp, Homo sapiens
ccccgcccgtttgccagcgctcaggcaggagctctggactgggcgcgccgccgccctggagtgagggaagcccagtggaagggggtcccgggagccggctgcgatggacgccgtcttggaacccttcccggccgacaggctgttccccggatccagcttcctggacttgggggatctgaacgagtcggacttcctcaacaatgcgcactttcctgagcacctggaccactttacggagaacatggaggacttctccaatgacctgttcagcagcttctttgatgaccctgtgctggatgagaagagccctctattggacatggaactggactcccctacgccaggcatccaggcggagcacagctactccctgagcggcgactcagcgccccagagcccccttgtgcccatcaagatggaggacaccacccaagatgcagagcatggagcatgggcgctgggacacaaactgtgctccatcatggtgaagcaggagcagagcccggagctgcccgtggaccctctggctgccccctcggccatggctgccgcggccgccatggccaccaccccgctgctgggcctcagccccttgtccaggctgcccatcccccaccaggccccgggagagatgactcagctgccagtgatcaaagcagagcctctggaggtgaaccagttcctcaaagtgacaccggaggacctggtgcagatgcctccgacgccccccagcagccatggcagtgacagcgacggctcccagagtccccgctctctgcccccctccagccctgtcaggcccatggcgcgctcctccacggccatctccacctccccactcctcactgcccctcacaaattacaggggacatcagggccactgctcctgacagaggaggagaagcggaccctgattgctgagggctaccccatccccacaaaactccccctcaccaaagccgaggagaaggccttgaagagagtccggaggaaaatcaagaacaagatctcagcccaggagagccgtcgtaagaagaaggagtatgtggagtgtctagaaaagaaggtggagacatttacatctgagaacaatgaactgtggaagaaggtggagaccctggagaatgccaacaggaccctgctccagcagctgcagaaactccagactctggtcaccaacaagatctccagaccttacaagatggccgccacccagactgggacctgcctcatggtggcagccttgtgctttgttctggtgctgggctccctcgtgccctgccttcccgagttctcctccggctcccagactgtgaaggaagaccccctggccgcagacggcgtctacacggccagccagatgccctcccgaagcctcctattctacgatgacggggcaggcttatgggaagatggccgcagcaccctgctgcccatggagcccccagatggctgggaaatcaaccccggggggccggcagagcagcggccccgggaccacctgcagcatgatcacctggacagcacccacgagaccaccaagtacctgagtgaggcctggcctaaagacggtggaaacggcaccagccccgacttctcccactccaaggagtggttccacgacagggatctgggccccaacaccaccatcaaactctcctaggccatgccaagacccaggacataggacggacccctggtacccagaagaggagttcttgctcactaacccggatccgcctcgtgcccctgcctcctggagcttcccattccaggagaaaaggctccacttcccagcccttccttgcccctgacatttggactcttcccttgggccgaccactctgttctcattctccttcccaccaacatccatccgtccttctcagacaaaccactcactgggtaccccacctcctctctcatatgcccaacacgaccactgcctccctgcccccacacctgcacccaaacagacacatcaacgcaccccactcacagacaccccttaccccacccccactgtacagagaccaagaacagaaattgtttgtaaataatgaaccttattttttattattgccaatcccctaagatattgtattttacaaatctccctcttcccttcgcccctcccttgttttatattttatgaagttagtgcgggctttgctgctccctggcccaggaaagagggactacctgaccctcacctggcacccccctgctgctgcccaagccgctgggcctttttaattgccaaactgctctcttcatcagctcagcacatgctttaagaaagcaaacccaaaaaaaaaaaaaaaaagatgcagcatcaaaaaaaaaaaaaaaaaaaaaaaaaaaaaaaaa

SEQ ID NO: 299 - protein, 519 aa, Homo sapiens
MDAVLEPFPADRLFPGSSFLDLGDLNESDFLNNAHFPEHLDHFTENMEDFSNDLFSSFFDDPVLDEKSPLLDMELDSPTPGIQAEHSYSLSGDSAPQSPLVPIKMEDTTQDAEHGAWALGHKLCSIMVKQEQSPELPVDPLAAPSAMAAAAAMATTPLLGLSPLSRLPIPHQAPGEMTQLPVIKAEPLEVNQFLKVTPEDLVQMPPTPPSSHGSDSDGSQSPRSLPPSSPVRPMARSSTAISTSPLLTAPHKLQGTSGPLLLTEEEKRTLIAEGYPIPTKLPLTKAEEKALKRVRRKIKNKISAQESRRKKKEYVECLEKKVETFTSENNELWKKVETLENANRTLLQQLQKLQTLVTNKISRPYKMAATQTGTCLMVAALCFVLVLGSLVPCLPEFSSGSQTVKEDPLAADGVYTASQMPSRSLLFYDDGAGLWEDGRSTLLPMEPPDGWEINPGGPAEQRPRDHLQHDHLDSTHETTKYLSEAWPKDGGNGTSPDFSHSKEWFHDRDLGPNTTIKLS

SEQ ID NO: 300 - DNA, 2062 bp, Homo sapiens
gtcagtccctcctgtagccgccgccgccgccgcccgccgcccctctgccagcagctccggcgccacctcgggccggcgtctccggcgggcgggagccaggcgctgacgggcgcggcgggggcggccgagcgctcctgcggctgcgactcaggctccggcgtctgcgcttccccatggggctggcctgcggcgcctgggcgctctgagattgtcactgctgttccaagggcacacgcagagggatttggaattcctggagagttgcctttgtgagaagctggaaatatttctttcaattccatctcttagttttccataggaacatcaagaaatcatgaacaactttggtaatgaagagtttgactgccacttcctcgatgaaggttttactgccaaggacattctggaccagaaaattaatgaagtttcttcttctgatgataaggatgccttctatgtggcagacctgggagacattctaaagaaacatctgaggtggttaaaagctctccctcgtgtcacccccttttatgcagtcaaatgtaatgatagcaaagccatcgtgaagacccttgctgctaccgggacaggatttgactgtgctagcaagactgaaatacagttggtgcagagtctgggggtgcctccagagaggattatctatgcaaatccttgtaaacaagtatctcaaattaagtatgctgctaataatggagtccagatgatgacttttgatagtgaagttgagttgatgaaagttgccagagcacatcccaaagcaaagttggttttgcggattgccactgatgattccaaagcagtctgtcgtctcagtgtgaaattcggtgccacgctcagaaccagcaggctccttttggaacgggcgaaagagctaaatatcgatgttgttggtgtcagcttccatgtaggaagcggctgtaccgatcctgagaccttcgtgcaggcaatctctgatgcccgctgtgtttttgacatgggggctgaggttggtttcagcatgtatctgcttgatattggcggtggctttcctggatctgaggatgtgaaacttaaatttgaagagatcaccggcgtaatcaacccagcgttggacaaatactttccgtcagactctggagtgagaatcatagctgagcccggcagatactatgttgcatcagctttcacgcttgcagttaatatcattgccaagaaaattgtattaaaggaacagacgggctctgatgacgaagatgagtcgagtgagcagacctttatgtattatgtgaatgatggcgtctatggatcatttaattgcatactctatgaccacgcacatgtaaagccccttctgcaaaagagacctaaaccagatgagaagtattattcatccagcatatggggaccaacatgtgatggcctcgatcggattgttgagcgctgtgacctgcctgaaatgcatgtgggtgattggatgctctttgaaaacatgggcgcttacactgttgctgctgcctctacgttcaatggcttccagaggccgacgatctactatgtgatgtcagggcctgcgtggcaactcatgcagcaattccagaaccccgacttcccacccgaagtagaggaacaggatgccagcaccctgcctgtgtcttgtgcctgggagagtgggatgaaacgccacagagcagcctgtgcttcggctagtattaatgtgtagatagcactctggtagctgttaactgcaagtttagcttgaattaagggatttggggggaccatgtaacttaattactgctagttttgaaatgtctttgtaagagtagggtcgccatgatgcagccatatggaagactaggatatgggtcacacttatctgtgttcctatggaaactatttgaatatttgttttatatggatttttattcactcttcagacacgctactcaagagtgcccctcagctgctgaacaagcatttgtagcttgtacaatggcagaatgggccaaaagcttagtgttgtgacctgtttttaaaataaagtatcttgaaataattaggc

SEQ ID NO: 301 - protein, 461 aa, Homo sapiens
MNNFGNEEFDCHFLDEGFTAKDILDQKINEVSSSDDKDAFYVADLGDILKKHLRWLKALPRVTPFYAVKCNDSKAIVKTLAATGTGFDCASKTEIQLVQSLGVPPERIIYANPCKQVSQIKYAANNGVQMMTFDSEVELMKVARAHPKAKLVLRIATDDSKAVCRLSVKFGATLRTSRLLLERAKELNIDVVGVSFHVGSGCTDPETFVQAISDARCVFDMGAEVGFSMYLLDIGGGFPGSEDVKLKFEEITGVINPALDKYFPSDSGVRIIAEPGRYYVASAFTLAVNIIAKKIVLKEQTGSDDEDESSEQTFMYYVNDGVYGSFNCILYDHAHVKPLLQKRPKPDEKYYSSSIWGPTCDGLDRIVERCDLPEMHVGDWMLFENMGAYTVAAASTFNGFQRPTIYYVMSGPAWQLMQQFQNPDFPPEVEEQDASTLPVSCAWESGMKRHRAACASASINV

SEQ ID NO: 302 - DNA, 942 bp, Homo sapiens
atgagaattgcagtgatttgcttttgcctcctaggcatcacctgtgccataccagttaaacaggctgattctggaagttctgaggaaaagcagctttacaacaaatacccagatgctgtggccacatggctaaaccctgacccatctcagaagcagaatctcctagccccacagaatgctgtgtcctctgaagaaaccaatgactttaaacaagagacccttccaagtaagtccaacgaaagccatgaccacatggatgatatggatgatgaagatgatgatgaccatgtggacagccaggactccattgactcgaacgactctgatgatgtagatgacactgatgattctcaccagtctgatgagtctcaccattctgatgaatctgatgaactggtcactgattttcccacggacctgccagcaaccgaagttttcactccagttgtccccacagtagacacatatgatggccgaggtgatagtgtggtttatggactgaggtcaaaatctaagaagtttcgcagacctgacatccagtaccctgatgctacagacgagcacatcacctcacacatggaaagcgaggagttgaatggtgcatacaaggccatccccgttgcccaggacctgaacgcgccttctgattgggacagccgtgggaaggacagttatgaaacgagtcagctggatgaccagagtgctgaagcccacagccacaagcagtccagattatataagcggaaagctaatgatgagagcaatgagcattccgatgtgattgatagtcaggaactttccaaagtcagccgtgaattccacagccatgaatttcacagccatgaagatatgctggttgtagaccccaaaagtaaggaagaagataaacacctgaaatttcgtatttctcatgaattagatagtgcatcttctgaggtcaat

SEQ ID NO: 303 - protein, 314 aa, Homo sapiens
MRIAVICFCLLGITCAIPVKQADSGSSEEKQLYNKYPDAVATWLNPDPSQKQNLLAPQNAVSSEETNDFKQETLPSKSNESHDHMDDMDDEDDDDHVDSQDSIDSNDSDDVDDTDDSHQSDESHHSDESDELVTDFPTDLPATEVFTPVVPTVDTYDGRGDSVVYGLRSKSKKFRRPDIQYPDATDEHITSHMESEELNGAYKAIPVAQDLNAPSDWDSRGKDSYETSQLDDQSAEAHSHKQSRLYKRKANDESNEHSDVIDSQELSKVSREFHSHEFHSHEDMLVVDPKSKEEDKHLKFRISHELDSASSEVN

SEQ ID NO: 304 - DNA, 1524 bp, Homo sapiens
gcagagcacagcatcgtcgggaccagactcgtctcaggccagttgcagccttctcagccaaacgccgaccaaggaaaactcactaccatgagaattgcagtgatttgcttttgcctcctaggcatcacctgtgccataccagttaaacaggctgattctggaagttctgaggaaaagcagctttacaacaaatacccagatgctgtggccacatggctaaaccctgacccatctcagaagcagaatctcctagccccacagacccttccaagtaagtccaacgaaagccatgaccacatggatgatatggatgatgaagatgatgatgaccatgtggacagccaggactccattgactcgaacgactctgatgatgtagatgacactgatgattctcaccagtctgatgagtctcaccattctgatgaatctgatgaactggtcactgattttcccacggacctgccagcaaccgaagttttcactccagttgtccccacagtagacacatatgatggccgaggtgatagtgtggtttatggactgaggtcaaaatctaagaagtttcgcagacctgacatccagtaccctgatgctacagacgaggacatcacctcacacatggaaagcgaggagttgaatggtgcatacaaggccatccccgttgcccaggacctgaacgcgccttctgattgggacagccgtgggaaggacagttatgaaacgagtcagctggatgaccagagtgctgaaacccacagccacaagcagtccagattatataagcggaaagccaatgatgagagcaatgagcattccgatgtgattgatagtcaggaactttccaaagtcagccgtgaattccacagccatgaatttcacagccatgaagatatgctggttgtagaccccaaaagtaaggaagaagataaacacctgaaatttcgtatttctcatgaattagatagtgcatcttctgaggtcaattaaaaggagaaaaaatacaatttctcactttgcatttagtcaaaagaaaaaatgctttatagcaaaatgaaagagaacatgaaatgcttctttctcagtttattggttgaatgtgtatctatttgagtctggaaataactaatgtgtttgataattagtttagtttgtggcttcatggaaactccctgtaaactaaaagcttcagggttatgtctatgttcattctatagaagaaatgcaaactatcactgtattttaatatttgttattctctcatgaatagaaatttatgtagaagcaaacaaaatacttttacccacttaaaaagagaatataacattttatgtcactataatcttttgttttttaagttagtgtatattttgttgtgattatctttttgtggtgtgaataaatcttttatcttgaatgtaataagaatttggtggtgtcaattgcttatttgttttcccacggttgtccagcaattaataaaacataaccttttttactgcctaaaaaaaaaaaaaaaaaaaa

SEQ ID NO: 305 - protein, 300 aa, Homo sapiens
MRIAVICFCLLGITCAIPVKQADSGSSEEKQLYNKYPDAVATWLNPDPSQKQNLLAPQTLPSKSNESHDHMDDMDDEDDDDHVDSQDSIDSNDSDDVDDTDDSHQSDESHHSDESDELVTDFPTDLPATEVFTPVVPTVDTYDGRGDSVVYGLRSKSKKFRRPDIQYPDATDEDITSHMESEELNGAYKAIPVAQDLNAPSDWDSRGKDSYETSQLDDQSAETHSHKQSRLYKRKANDESNEHSDVIDSQELSKVSREFHSHEFHSHEDMLVVDPKSKEEDKHLKFRISHELDSASSEVN

SEQ ID NO: 306 - DNA, 861 bp, Homo sapiens
atgagaattgcagtgatttgcttttgcctcctaggcatcacctgtgccataccagttaaacaggctgattctggaagttctgaggaaaagcagaatgctgtgtcctctgaagaaaccaatgactttaaacaagagacccttccaagtaagtccaacgaaagccatgaccacatggatgatatggatgatgaagatgatgatgaccatgtggacagccaggactccattgactcgaacgactctgatgatgtagatgacactgatgattctcaccagtctgatgagtctcaccattctgatgaatctgatgaactggtcactgattttcccacggacctgccagcaaccgaagttttcactccagttgtccccacagtagacacatatgatggccgaggtgatagtgtggtttatggactgaggtcaaaatctaagaagtttcgcagacctgacatccagtaccctgatgctacagacgagcacatcacctcacacatggaaagcgaggagttgaatggtgcatacaaggccatccccgttgcccaggacctgaacgcgccttctgattgggacagccgtgggaaggacagttatgaaacgagtcagctggatgaccagagtgctgaagcccacagccacaagcagtccagattatataagcggaaagctaatgatgagagcaatgagcattccgatgtgattgatagtcaggaactttccaaagtcagccgtgaattccacagccatgaatttcacagccatgaagatatgctggttgtagaccccaaaagtaaggaagaagataaacacctgaaatttcgtatttctcatgaattagatagtgcatcttctgaggtcaat

SEQ ID NO: 307 - protein, 287 aa, Homo sapiens
MRIAVICFCLLGITCAIPVKQADSGSSEEKQNAVSSEETNDFKQETLPSKSNESHDHMDDMDDEDDDDHVDSQDSIDSNDSDDVDDTDDSHQSDESHHSDESDELVTDFPTDLPATEVFTPVVPTVDTYDGRGDSVVYGLRSKSKKFRRPDIQYPDATDEHITSHMESEELNGAYKAIPVAQDLNAPSDWDSRGKDSYETSQLDDQSAEAHSHKQSRLYKRKANDESNEHSDVIDSQELSKVSREFHSHEFHSHEDMLVVDPKSKEEDKHLKFRISHELDSASSEVN

SEQ ID NO: 308 - DNA, 606 bp, Homo sapiens
atggcgctgtcctgggttcttacagtcctgagcctcctacctctgctggaagcccagatcccattgtgtgccaacctagtaccggtgcccatcaccaacgccaccctggaccggatcactggcaagtggttttatatcgcatcggcctttcgaaacgaggagtacaataagtcggttcaggagatccaagcaaccttcttttactttacccccaacaagacagaggacacgatctttctcagagagtaccagacccgccagaaccagtgcttctataactccagttacctgaatgtccagcgggagaatgggaccgtctccagatacgagggaggccgagaacatgttgctcacctgctgttccttagggacaccaagaccttgatgtttggttcctacctggacgatgagaagaactgggggctgtctttctatgctgacaagccagagacgaccaaggagcaactgggagagttctacgaagctctcgactgcttgtgcattcccaggtcagatgtcatgtacaccgactggaaaaaggataagtgtgagccactggagaagcagcacgagaaggagaggaaacaggaggagggggaatcctag

SEQ ID NO: 309 - protein, 201 aa, Homo sapiens
MALSWVLTVLSLLPLLEAQIPLCANLVPVPITNATLDRITGKWFYIASAFRNEEYNKSVQEIQATFFYFTPNKTEDTIFLREYQTRQNQCFYNSSYLNVQRENGTVSRYEGGREHVAHLLFLRDTKTLMFGSYLDDEKNWGLSFYADKPETTKEQLGEFYEALDCLCIPRSDVMYTDWKKDKCEPLEKQHEKERKQEEGES

SEQ ID NO: 310 - DNA, 5614 bp, Homo sapiens
  misc_feature 4134: n = A,T,C or G
gcgtccggtgaaatgcagaatctgagagaacgcgagaagatgagatcattacagggtggaaagttctgcagcagccttttctggtaatccctttctgcagaacctgatgtttatgggctctaaaacgcagcttagctttagaagcaacagaaagcatgaaatagggtgtccattttaaatgtgttcctgcaacttttttcattaaaactttgagggcccaattttaatttgtggaatattcccgttaatgatgagatctaattaagacatccattaaaagcccgttaaagttaatttaacgtaaaaattccaatagaactgtattggattttctccattaaattgacgttatggatttttaacggatgtcttaattgtacgttattattaacgggaatactgtattacacagattaaaatcaggtcctaagtcaacttggaagagctaagagcatgttttaatattaaaagtcttgcatacctagtgcacagtttggagacgcaaggatagatctgtttactctagttgaacattttctatacaattgaaagcaacctataatagataaatccatcattgcatttaaacaatgaatttccttattctcaaaggacaaatacgtctggattatgtggtaaattgctactcagctatggtgaaatatttatactattctaggcacaacactaggaactaggtgattctgaaacaaaaggaatattttctgttgttgctttaattaccaaggttatttttttttaatctcaacactgacaaaatgaaaccaaatatctcttcctcaccatttctcaaggaggctgcctgttggaattgttttggaattttgacatgatccctaaattcaacattgggattaaaaaaaaaaaaaaacttcttatttacctcctagggaaagtgttgcccttatgccacatataatagcaaattgctttttttatggcatgcataacctagatgggaaaaaatatggcgcttcggggaaggagggaaaaagtaaatgaagttccaggaatgtcattctgaagtaatgaggcatggacagaaaatatacccctcacatcatcggattgagatggcagtcgaaatagcttcattgaagtgtcagcactcatccatcaatcaatcacccacaaggaaaaatagcaacagtacaacggggtggcttttatgggatttactcatgggcatagggaatagcggctcaaatgtagttctgacatgaaaagcaaggtgctgatattattttttatgatgggaggatcataaagtgaattgagaacagtgaggtctgtctttgcttaacctattcaaccagaaatgaatggagctcgactggaaaggaacagtcttcagatgggttaagattgaagggtggactggactctactgagcaccgtccttcaacaaggaaattctattaaaggaaaatcaatgcattagtattggggttctygtagctgttaaaaattgtctgctccaatccagggttattaggccaaagttacataattcagatctcactgcaaccatccaaaagtggattctcgagcccttgctccaatggggggaggagatcaatacaattcccaattccatggaaattgtttcccttctaaggaagaaaaaataaatcatctgcttcaacatataatcgatatggttttgttagcgtaatttctatggtgggtggggtgggaggtgagagaaaaaaatattgttaaatttggtaagacaggtgaattgccgcctggcaaccgtgcatgtcactgccgagggatggctgctaaggttcaccttagaaaacaagatctgggctggcactggggcatacatcaccactcagcatattcctagaggccaggcctgtcttcactcagccagccctctgaggcttctagaaacttctttctggaggaaaaaaactaaataacataaactcaggagaatgtctttacccaccttcataccactgctttctttttgctgaataaaacacagttctgataagtaagaactttagaattggaaaggaggctgacatgcaaatataatgcaaattaccctcaagtatcgccattcttccaccacctcttggtaccagtgagagcgagagattgccttttcttccccatccctccttccagctaagaccaccaaccagctgcaaattgagatgtccatttaaaaatttatatgtcaatatttaaatgttacatatttggccctattttgtagttcagcaaatcctccaaatacacagcatgttacaaggcactggtggcacagggcacaacaggaaatgatatttatttagcaaattcatttaacaaatattattgggcacctgttatgtgagacactgtcctaggcactgtgggataacaacagcaaacacttcacacaacagcctggccttcctgtgttttacaacagctcctaaagatagctgatatcaagacatttgagggacacagttcatgtagaatcaaaatattagtatttcagaataaggattttttttctgaaaagcatacagagaggaaacagcttaaaaataggtcaagacctaaaaacagaatataatcacggaataaactggataacccagacagtccccacagaatttctttcaggtcacagatttcttaaaactcacccccaaaatgtgcctgcttggttgtttgaatcttgcataattaatgtcacaggcgcaagccgctgaacttagttgagatgcagaaaacaaacaaatgcaatgacatatctgagaagcatttatgtaactccggttaagtggtgaggaggggtgtgtgaagacagtgtgcatgcatgagtgtgtattcatatatatgtgtatacatatgaatttcactgttattttccagggtctatggacaatgtggcagtaagagtctatgatgttctgaaacttttcacagtaaatccaaagattacagaccttacaaggtgcttgcattctgttgcttttccatctgtcacttctcaggttatttgactgtgttcaaaccttcttttctttttcattgagtttcattttttaagcttgttaaatgcttttgtttaaaaaaaaaaaaaaaaccccaaatgtcatttttcacattatcctctcttctctgcaacaaggatagtaagatgtagatgaatgcaaaaataataacaacaataaggaaatatattaaagctttaaaatatgcacatatgtagttctaaagagcaataacggtagtatctatttcgaacatgcattaggcaaaaaagaaatcaaaactgaaattttcgtgtatttttccccttgtaagatgttcaaatgctaacttcattttctcctttcctctatgtggcactttctcaaaatatctatgaaatacttttagacaaagattgagctggagaaagagatacaaatttccatccccccagacagagagacatatttccattgtaggaaggcattaaacattttgaaacttgtgaatcatctttagaatttctactggggaattttacttcttcatccaaagtaaaagccacttatctcctttggttcccagtgacagattcagaggcatacgcagatatacaattttcaggctctagttaatcttcttccaatagttacgaacaatgggctaacaggcgtgggtgtttctccaaaaattattcatgcacaaggcagcccaaagcttcagggaaaactagaaatgtgttatggattagaataggactgttttaaaatgctwgtaccrggtggaacgctatttctgcaacaggactctgtccatttcctttggaacaatatattccaagtaaaatggctcttccaaggaatgacacctttacttgacacccttcggcatacaaatgattttaccaatagccatgattattattaaggccttttaaaatacaggctgtttgaaaaaagacagattaaatattcacagcctttgtatcatggttatttgcttaaaacagcttttagaagtacaagtaataactttttgataagaaaccccaggagaaactttttggtaagaaacctcaaaaaatttgaacaaaggcattacaaaaaaaaaaaaaaaacaaaagcntaaccactccattcaactctctcagaaaataaatttcaatgtgttcaatgaattgtcttgaacctgaaacctgcatttagatatcagtcccctgccaatagctaatattaacagaatttgaacaatcatacaattatgtctcaaatgtgaagactttgtacagtaatattttcactttctaaatgacccatataacattcaggaattatagatgtgtatgtatattttttaagtacagaaagttcagccagtcttcagagaagtaaaagtgatgtctattgtgcattgaagtaaatattacaaacattccagtttcgcaatacaatacttgagctttcgaacacctcagacactagaatgtgtaatgcgagtcaaaaaagctgacatacaaaacaattcccatttggctcagggttcctaaatgtcacaatatcttgggtaaaatatactttttgatttcctgatgatgtccttctaatcccttctgactttgattcctaacagccaggcactgttgacatgaatcattaacttccaaacccctttaaaatcaagaagctaggygatcatacagtcatttcaatggccaaccagttcttgctctacagagcttttacacctttttgggaaacctgatatcaaacacatttatgttatatatttgctcccttgcattaattctagatttttttttaatttcttttagaaagggcaggggggaagtgggtcagagcaaggttcaagaatcacattcatccttgctctaaagtgtttacttgccagcaaagaaaggcaaacacatttttatattcagaaagcagaccggtcattttcraagaaaaatgactgcaaccatgcctgtagaatgtttctgtgcaagcgcactaattttctatcacctgcatgctgtatataatacatttgcctgtatactaggaagaaaaaccaggctgttttccctgagtacaatgcagcttggatggctgggagcgtaagccttccgtgcatttttatagtgtacatatttgtatatactaactatatcgccatgtatgaacacagattttgttatatttgcttgtttctgtttcctaccaaactggcccacaatggggattcttttgtatagaaaaaatatgcttgkaattttttcctggtcattctctttcaatagcttatgaaagaattagatctgagtttacaaagaaactataagaaccaagtttgtctgtctgcatgagtcccgtccaattgctggatctagggaggaaccaacttcctaattcagagttttccttttaaaggcatgctttacccccatgggaaaactgcacactcatccatgtagaattattctctttgtattttatctaatagtgcctgaaaatttttttaatgtcttcttagaagaagaattcataattgtcaaaatttgaaacattagcttaattttgtttttatgacctcaagattcttctcc

SEQ ID NO: 311 - protein, 74 aa, Homo sapiens
MKFQECHSEVMRHGQKIYPSHHRIEMAVEIASLKCQHSSINQSPTRKNSNSTTGWLLWDLLMGIGNSGSNVVLT

SEQ ID NO: 312 - DNA, 5932 bp, Homo sapiens
gcctccgctgcagtcgctgcgtctccaagcaacatggctgacaaggccaagcctgccaaagctgccaacaggacgccccccaagtccccgggggacccctcgaaggaccgggcagccaagaggctgtcgctggaatcggagggtgctggtgagggggcagccgcatcccctgagctcagtgccctggaggaggccttccggcgctttgccgtgcacggggacgccagggccaccgggagggagatgcacggcaagaactggtcgaagctgtgcaaggactgccaggtgatcgacggcaggaacgtgaccgtcactgacgtggacatcgtcttcagcaagatcaaagggaagtcttgccggaccatcacctttgagcagttccaggaggcgctggaggagctcgccaagaagcgattcaaagacaagagcagcgaggaggccgttcgcgaggtgcacaggctcatcgagggcaaggcgcccatcatctcaggggtgacgaaagccatctcgtcgcccacagtgtcgaggctcacggacaccaccaagttcacgggctcccacaaggagcgcttcgacccctctggcaagggcaagggcaaggctggccgcgtggatctggtggacgagtcaggctatgtgtccggctacaagcacgcaggcacctacgaccagaaggtgcaagggggcaagtagcccccgctccatgcctcgcggcactgccggtgtccccagagcagggactctgtcacctcgcacttcattacattcctgtactaactggggcagaactcagacgggtgccccagagggggctggggggcggccaggcccaggcctccctcctgcccctcctcctaccggatgcccccagcactcccctctcaaaccaggtttgggccccagttcgctgaccctcctaatacacctgcctcgtcctcagccatttccaaagtgtctcgcggatcacaccacactgggcacgtggtttgcaggtcaaaggggcgttttaaagcagctggctgtcatggcaacaggaggctgtgctgacctcctgagcggcagacaccttccaggagccctgagggtggcaggagctaaccccaaccagcaggcaactaacacggaattggccccacaccggacgtgggaggtgtctgtggggcccgaggcctgtcctgtgtgcagcggacaccacggggccttcctgctttcctgggcagagggcagagtgaggccacctggcgggggtgctgggcgcctggcacatgtgtggggaagccggtcacatggacacacctgtgcacacatgcctacaggccagctctgtgccaagggcaacctaggtaaaacgaaagccgtcaggggcagtgggcggcttcccggctgaccacagtggcttggactgtgagggtagagtaggctcgctttgctttcctgagaagatgcggtggctgcctatgttctcagagcgggtctgggaagattcagaatgtccggtccctgtggtgttgccaggcaagagacacgaagtgccgagacactcctcgcctcaccgcgtgacagagcctctgcccggccctcccgttcgcccgtcctcactagctgcaccctgtttgctcgcagacctcccattgccacagcccaagcaccttcttcaactctcccaaaatggctcagcctaacctctcctggccaatcccccccgccggagagcaggacactagggaggacccccagtcctgcagtgtctgtgggggtttctctgccagcagggggctgagcagagcccatccaggacactccacactgccaggacacacccaggcggcccgcccttgcctgtctgcacctggggagaagccggcgctcctgctccctcctggggaggctgacgggtgtggccacccgctgtcacaatggcacactgccactgtcccttggcacgcacacagccacagccacacgtgtgacctgctgggccgtggttctggagtctacctgcggatgagcctgcggcagtcctggggaaacttttccagagcctgttagcccgtggctacggtcaggctctggccagggcagagggctgcccagggccaggctcacagtacaggagggtggcgaggcccctccctcactggcacgcatgagcaccacccgcctccccgactcccaagagtgcacctgctgcggccacagctccgtggaaggactccccctacctgagcagagcagaagccccagggcggagctcccagccagcatggtccgctgagggctggggggcggtctccgaggcccctcaacagagaagcctccacctgaggatggggaggacctggcaggcagcttccacggcagggctgggaagttcagtgcctggaaataaagagcaaggaaaaatggacctcaggcttcgtggctcctttaggatgtcacctcaccggcctggggaaggcggggggtgcccaagcccagccctgtgcccccgctgaacctggctggaccgcgtgtgaaaggcagaactaacgtgcggaaacatttgaaaacaactctgaatgtgcggttcggaatcacccgatcacagacgagcggtcaccggaatcgcccggtcacagacgagcagtcatcggactcacccgatcacagacgagcggtcaccggaatcgcccgatcacagacgagcggccaccggaatcgcccaatcacagacaagcagtcatcggaatcacccgatcacagacgagcagtcatcggactcacccgatcacagacgagcggtcaccagactcgcccgatcacagacgagcagtcatcggaatcacccgatcacagacgagcagtcatcggactcacccgatcacagacgagcggtcaccagaatcgcccgatcacagacgagcagtcatcggaatcacccgatcacagacgagtggccaccggaatcacccgataacagcccatcacaactccaaagcccttgtgttgaaaaggccgaggacgagtggtcaccaaacagggtggctccccaggtcccgaagcctgagacccggaaggccctggcacccttacaccctcggactcctgccctcctcggcctccctggccccagcgcggctccaccctgggctgcgtctcctggtcacaggctgcgtttctcctttctgtccgtgggcagcccagtccccacagtcacggccaagccacgcagaacgaacatgactccagaggacctcgccctggagctgagcctggcgccgggtcaggacggagggaagggcgggttggggtccgcgggtcctcacaccgcacggcaggcacagaggctcgccaggccctgatccggtctgtggggacgagggacactgaggagaggtgctgggcaccaggacgctgcctcctggtccctggttggcctcagacaagcacggcctcgagaaaagagccaagcgcatcgggagcacaccagaaaccggccctgagcacgagaagagcctccgcccggcccgggcaccacccgacctcgcagggagcaggccctgtcaccgacgggtcacctcgcccacacggccagcaccgactcaccacagcccttcccagacctggctggagtggccggagcggcggggctcatggctcccatcttggcccctggaggtgagctcattcacagaagtggtcccttcactctgagagagaaaatcgtggcgtgcatcccaaaccctaggccacgcctgtgggtttcgtgaatgagatcgaggctgctgtggcaccctgcccgtcctggcctggagcaccctgggatcctggagggagaggccccacgcccccactctccctccacacttccagggttggtgcccacgagttagaggcacggcctcccccagcggccctcaggcttttctcagacatgcgggagccaggagagcacccttctccactcagctccaaagcgaatctttgaaaacacccactcggctcccatctctgtcacctagccaggaggggtagcaaaaataaagtcacgaggacatagtggtcaccactgtcagttacaacttgtctgtggaatccgtaattgcatctgtgtgccgcctccgaacacagaacattgtttggacggcagccccactgcacataacagacccgtgcatcttcctcagtcagtttctgaatattgtgaattcaggcaggtgtgtgttctcttctgcatgtttttatgcactgccaattagcttctactaaccacggttcaacagaaaataaatgtgtatttgtgaataacaaactgcacaacctgcaaaccaggagagagggacaggttctgtcaggggtgacaccaggacacagggacaggttctgtcgggggtgacaccaggacacagggacaggttctgtcatgggtgacacgaggacacagggacaggttctatcatgggtgacaccaggagagagggacaggttctgttgggggtgacaagaggagacagggacaggttctgtcgrgggtgacaccagsagagaggsacaggttctgtcaggggtgacaccaggagagagggacaggttctgttgggggtgacaccaggacacaggaataggttctgtcgggaggacagtgctgatcgtgtctcagcatcaggaaaggagaaaggcagagggagagcgctgagaagactgttcacgccagagtgcttatttatttttaatttactgctataggataagcaaccaggtagtgttcctaacaattagcgttaccaaaattaaagttcaaattatatgtttaaaatattgtagaagatatatatttatactggactacttttacaccttctaatatcctgtccaagtttgggcgcagatggtggagttgggctggcatcatgtcctgtggccgccccacttgcctgttggtgccactccatcccgggccccagggatgccagctcagggctgaccacagcagccctgcgtgggcatcacctcctaccccagcccccatcctgggctgctgcggccgcctgcttttgtgaatggtgttttgttggcacagggcctgtcctgtgttttcacacaggcctgtggctcctgctgtacaagtggagtggggaggagttgagatggagacgccttggccctggacacttacctgtccctctactggcccagctcatctcctcctgtgggcaatcacgcgtgcactggccaccctcccaccccacagcacacaccacgaggggatggcacagggggaagatgaggctggaccgtgatgttatcaataggctagaacgtccttcaaacactgaacctgcatctttcctcctcttactactgaacactttgtgagctctggtggtccagggtgcagcgtttgtccctgggcatgtgatggggagtcctgggcacatcgagatgctttacttctttctttcgacctcttaaaaaactaaaccaagccaaaccacaaaggaaatctgcacaacttaagagaaacttgaaagggatcgtgtaactactagtttgtactaagtttttttcaagaaagggaaacaaatttatatatatatatatatatatatatatgtgcaatatatttttacactgtgtgattaacattagggagtactgagtgcatcactttatcagtgtgacgggtgatgtccacgtcatggctgttctgactctgaaagccacttctgctgatgtctaaaccgcactcaccgcggacgtccggggttgtggtggccctgctgtcctcctgcaggtgagaggtgtggtgttgcctgttggacttgctgttgagcctggcttgcaaacctgtagtgaaacagctcgtgtctgtgtgcacactgctcctgtgtctgctgtcgttaacattgtgtgtcaagttggtaaagtgacaaataaaggtgttaaaacatgg

SEQ ID NO: 313 - protein, 219 aa, Homo sapiens
MADKAKPAKAANRTPPKSPGDPSKDRAAKRLSLESEGAGEGAAASPELSALEEAFRRFAVHGDARATGREMHGKNWSKLCKDCQVIDGRNVTVTDVDIVFSKIKGKSCRTITFEQFQEALEELAKKRFKDKSSEEAVREVHRLIEGKAPIISGVTKAISSPTVSRLTDTTKFTGSHKERFDPSGKGKGKAGRVDLVDESGYVSGYKHAGTYDQKVQGGK

SEQ ID NO: 314 - DNA, 1908 bp, Homo sapiens
acaagatggaggattcggcctcggcctcgctgtcttctgcagccgctactggaacctccacctcgactccagcggccccgacagcacggaagcagctggataaagaacaggttagaaaggcagtggacgctctcttgacgcattgcaagtccaggaaaaacaattatgggttgcttttgaatgagaatgaaagtttatttttaatggtggtattatggaaaattccaagtaaagaactgagggtcagattgaccttgcctcatagtattcgatcagattcagaagatatctgtttatttacgaaggatgaacccaattcaactcctgaaaagacagaacagttttatagaaagcttttaaacaagcatggaattaaaaccgtttctcagattatctccctccaaactctaaagaaggaatataaatcctatgaagccaagctccgccttctgagcagttttgatttcttccttactgatgccagaattaggcggctcttaccctcactcattgggagacatttctatcaaagaaagaaagttccagtatctgtaaaccttctgtccaagaatttatcaagagagatcaatgactgtataggtggaacggtcttaaacatttctaaaagtggttcttgcagtgctatacgtattggtcacgttggaatgcaaattgagcacatcattgaaaacattgttgctgtcaccaaaggactttcagaaaaattgccagagaagtgggagagcgtgaaactcctgtttgtgaaaactgagaaatcggctgcacttcccatcttttcctcgtttgtcagcaattgggatgaagccaccaaaagatctttgcttaataagaagaaaaaagaggcaaggagaaaacgaagagaaagaaattttgaaaaacaaaaggagaggaagaagaagaggcagcaggctaggaagactgcatcagttcttagtaaagatgatgtggcacctgaaagtggtgatactacagtgaagaaacctgaatcaaagaaggaacagaccccagagcatgggaagaaaaaacgtggcagaggaaaagcccaagttaaagcaacaaatgaatccgaagacgaaatcccacagctggtaccaataggaaagaagactccagctaatgaaaaagtagagattcaaaaacatgccacaggaaagaagtctccagcaaagagtcctaatcccagcacacctcgtgggaagaaaagaaaggctttgccagcatctgagaccccaaaagctgcagagtctgagaccccagggaaaagcccagagaagaagccaaaaatcaaagaagaggcagtgaaggaaaaaagtccttcgctggggaaaaaagatgcgagacagactccaaaaaagccagaggccaagtttttcaccactcctagtaaatctgtgagaaaagcttcccacacccccaaaaaatggcccaaaaaacccaaataccccagtcgacctaaagtcagtgattcaactggaaggaaacctcaatgctgcctccagagctttttggaaatactcagatcctggccgcctttgtaaccttctctaaacgtcaggcctggacttaaaagattttttaaaacctccataagtagtccaggggcggtggctcacgcctgtaatcccagcactttgggaggccgaggcaggcggatcacaaggtcaacgagatcgagaccatcctggccaacatggtgaaaccctgtctgtaccaaaaatacaaaaattaattgggcatggtggtggacacctgtaatcccagctactagggaggctgaggcaggagaattgcttgaacctgggaggcggaggttgcagtgagccactgcactccagcctgatgacagagcaagactcagtcaaaaataaataaaaataataaaacctc

SEQ ID NO: 315 - protein, 517 aa, Homo sapiens
MEDSASASLSSAAATGTSTSTPAAPTARKQLDKEQVRKAVDALLTHCKSRKNNYGLLLNENESLFLMVVLWKIPSKELRVRLTLPHSIRSDSEDICLFTKDEPNSTPEKTEQFYRKLLNKHGIKTVSQIISLQTLKKEYKSYEAKLRLLSSFDFFLTDARIRRLLPSLIGRHFYQRKKVPVSVNLLSKNLSREINDCIGGTVLNISKSGSCSAIRIGHVGMQIEHIIENIVAVTKGLSEKLPEKWESVKLLFVKTEKSAALPIFSSFVSNWDEATKRSLLNKKKKEARRKRRERNFEKQKERKKKRQQARKTASVLSKDDVAPESGDTTVKKPESKKEQTPEHGKKKRGRGKAQVKATNESEDEIPQLVPIGKKTPANEKVEIQKHATGKKSPAKSPNPSTPRGKKRKALPASETPKAAESETPGKSPEKKPKIKEEAVKEKSPSLGKKDARQTPKKPEAKFFTTPSKSVRKASHTPKKWPKKPKYPSRPKVSDSTGRKPQCCLQSFLEILRSWPPL

SEQ ID NO: 316 - DNA, 3923 bp, Homo sapiens
acagaagaaatagcaagtgccgagaagctggcatcagaaaaacagaggggagatttgtgtggctgcagccgagggagaccaggaagatctgcatggtgggaaggacctgatgatacagaggaattacaacacatatacttagtgtttcaatgaacaccaagataaataagtgaagagctagtccgctgtgagtctcctcagtgacacagggctggatcaccatcgacggcactttctgagtactcagtgcagcaaagaaagactacagacatctcaatggcaggggtgagaaataagaaaggctgctgactttaccatctgaggccacacatctgctgaaatggagataattaacatcactagaaacagcaagatgacaatataatgtctaagtagtgacatgtttttgcacatttccagcccctttaaatatccacacacacaggaagcacaaaaggaagcacagagatccctgggagaaatgcccggccgccatcttgggtcatcgatgagcctcgccctgtgcctggtcccgcttgtgagggaaggacattagaaaatgaattgatgtgttccttaaaggatgggcaggaaaacagatcctgttgtggatatttatttgaacgggattacagatttgaaatgaagtcacaaagtgagcattaccaatgagaggaaaacagacgagaaaatcttgatggcttcacaagacatgcaacaaacaaaatggaatactgtgatgacatgaggcagccaagctggggaggagataaccacggggcagagggtcaggattctggccctgctgcctaaactgtgcgttcataaccaaatcatttcatatttctaaccctcaaaacaaagctgttgtaatatctgatctctacggttccttctgggcccaacattctccatatatccagccacactcatttttaatatttagttcccagatctgtactgtgacctttctacactgtagaataacattactcattttgttcaaagacccttcgtgttgctgcctaatatgtagctgactgtttttcctaaggagtgttctggcccaggggatctgtgaacaggctgggaagcatctcaagatctttccagggttatacttactagcacacagcatgatcattacggagtgaattatctaatcaacatcatcctcagtgtctttgcccatactgaaattcatttcccacttttgtgcccattctcaagacctcaaaatgtcattccattaatatcacaggattaacttttttttttaacctggaagaattcaatgttacatgcagctatgggaatttaattacatattttgttttccagtgcaaagatgactaagtcctttatccctcccctttgtttgattttttttccagtataaagttaaaatgcttagccttgtactgaggctgtatacagcacagcctctccccatccctccagccttatctgtcatcaccatcaacccctcccataccacctaaacaaaatctaacttgtaattccttgaacatgtcaggacatacattattccttctgcctgagaagctcttccttgtctcttaaatctagaatgatgtaaagttttgaataagttgactatcttacttcatgcaaagaagggacacatatgagattcatcatcacatgagacagcaaatactaaaagtgtaatttgattataagagtttagataaatatatgaaatgcaagagccacagagggaatgtttatggggcacgtttgtaagcctgggatgtgaagcaaaggcagggaacctcatagtatcttatataatatacttcatttctctatctctatcacaatatccaacaagcttttcacagaattcatgcagtgcaaatccccaaaggtaacctttatccatttcatggtgagtgcgctttagaattttggcaaatcatactggtcacttatctcaactttgagatgtgtttgtccttgtagttaattgaaagaaatagggcactcttgtgagccactttagggttcactcctggcaataaagaatttacaaagagctactcaggaccagttgttaagagctctgtgtgtgtgtgtgtgtgtgtgtgagtgtacatgccaaagtgtgcctctctctcttgacccattatttcagacttaaaacaagcatgttttcaaatggcactatgagctgccaatgatgtatcaccaccatatctcattattctccagtaaatgtgataataatgtcatctgttaacataaaaaaagtttgacttcacaaaagcagctggaaatggacaaccacaatatgcataaatctaactcctaccatcagctacacactgcttgacatatattgttagaagcacctcgcatttgtgggttctcttaagcaaaatacttgcattaggtctcagctggggctgtgcatcaggcggtttgagaaatattcaattctcagcagaagccagaatttgaattccctcatcttttaggaatcatttaccaggtttggagaggattcagacagctcaggtgctttcactaatgtctctgaacttctgtccctctttgtgttcatggatagtccaataaataatgttatctttgaactgatgctcataggagagaatataagaactctgagtgatatcaacattagggattcaaagaaatattagatttaagctcacactggtcaaaaggaaccaagatacaaagaactctgagctgtcatcgtccccatctctgtgagccacaaccaacagcaggacccaacgcatgtctgagatccttaaatcaaggaaaccagtgtcatgagttgaattctcctattatggatgctagcttctggccatctctggctctcctcttgacacatattagcttctagcctttgcttccacgacttttatcttttctccaacacatcgcttaccaatcctctctctgctctgttgctttggacttccccacaagaatttcaacgactctcaagtcttttcttccatccccaccactaacctgaatgcctagacccttatttttattaatttccaatagatgctgcctatgggctatattgctttagatgaacattagatatttaaagctcaagaggttcaaaatccaactcattatcttctctttctttcacctccctgctcctctccctatattactgattgcactgaacagcatggtccccaatgtagccatgcaaatgagaaacccagtggctccttgtggtacatgcatgcaagactgctgaagccagaaggatgactgattacgcctcatgggtggaggggaccactcctgggccttcgtgattgtcaggagcaagacctgagatgctccctgccttcagtgtcctctgcatctcccctttctaatgaagatccatagaatttgctacatttgagaattccaattaggaactcacatgttttatctgccctatcaattttttaaacttgctgaaaattaagttttttcaaaatctgtccttgtaaattactttttcttacagtgtcttggcatactatatcaactttgattctttgttacaacttttcttactcttttatcaccaaagtggcttttattctctttattattattattttcttttactactatattacgttgttattattttgttctctatagtatcaatttatttgatttagtttcaatttatttttattgctgacttttaaaataagtgattcggggggtgggagaacaggggagggagagcattaggacaaatacctaatgcatgtgggacttaaaacctagatgatgggttgataggtgcagcaaaccactatggcacacgtatacctgtgtaacaaacctacacattctgcacatgtatcccagaacgtaaagtaaaatttaaaaaaaagtga

SEQ ID NO: 317 - protein, 51 aa, Homo sapiens
MFLHISSPFKYPHTQEAQKEAQRSLGEMPGRHLGSSMSLALCLVPLVREGH

SEQ ID NO: 318 - DNA, 540 bp, Homo sapiens
gaattccgaggggtcgctgtgctgagcggcgggactgagctgttgagttagagccaacatgagtgagcgacaaggtgctgggccaaccaatggaaaagacaagacatctggtgaaaatgatggacagaagaaagttcaagaagaatttgacattgacatggatgcaccagagacagaacgtgcagcggtggccattcagtctcagttcagaaaattccagaagaagaaggctgggtctcagtcctagtgggagaaccccctcctagtccacctgaaagcaccaaattcaaccatcatctgtcaagaaattaaaagaacaacaccctagagagaagtcatccacacacaatccacacacgcatagcaaacctccaatgcatgtacagaaacctgtgatatttatacccttgtaggaaggtatagacaatggaattgtgagtagcttaatctctatgtttctctccattttcattcctcctgcaactattttccttgatgttgtaataaaatgaagttacgatgagaaaaaaaaaaaaaaaa

SEQ ID NO: 319 - protein, 62 aa, Homo sapiens
MSERQGAGPTNGKDKTSGENDGQKKVQEEFDIDMDAPETERAAVAIQSQFRKFQKKKAGSQS

SEQ ID NO: 320 - DNA, 1727 bp, Homo sapiens
acaacaaagatggcggcggcgactgtgacggtgacgaagacggcggcggcggcgacggcatttaacaaggcggtgtggtttactccatgcagttgtcaggagacctctgtatggcttttcaattttagttgaaattctctctccatggccttttggagtcccttgctgtatctccgaagtaaatttcaattactctacatttcatcaatgttggagtggcaagaaaaaggaggaacagatttggggtgaaaagttttgttttctaggtctaacaaactgtaaatgttaaaaaagcaaagatgggtgaaaaaaaaccagagcctttggacttcgtgaaagattttcaggaatacctgactcagcagacccatcacgtgaacatgatttctggatcagttagtggggacaaagaagcagaggctcttcagggagctggaacagatggtgatcaaaatggacttgatcacccatctgttgaagtttccttggatgaaaactcaggaatgttagtagacgggtttgaaaggacctttgatgggaagcttaagtgtcggtactgcaactatgccagcaaaggaacagcccggcttattgaacacatcagaatccacacaggtgaaaaacctcatcgatgtcatctttgtccatttgcatctgcttatgagcgtcatctggaagcccatatgcgttctcatactggagaaaaaccatacaaatgtgaattatgttccttccgctgcagtgatcgaagtaacttgtcccatcatcgaaggcgcaagcataaaatggtaccaattaaaggtactaggtcttccttaagcagcaagaaaatgtggggggttttacagaagaaaacaagcaatctgggctatagcagaagagcactaatcaacttaagtccaccttccatggtggttcagaaaccagactaccttaacgattttacccacgaaatcccaaatatccagactgactcctatgaaagtatggcaaaaaccacaccaactggtggccttccaagggacccccaagaactcatggttgataaccctttgaatcagctctcgactctagcagggcagttgtccagtctgccacccgaaaaccaaaaccctgcatcccctgatgtagttccctgccctgatgaaaagcctttcatgattcagcagccctctacccaagcagtagtttctgccgtatcagcaagtattcctcagagctcctctcccacaagcccagaacctcggccatcccatagtcaaaggaactatagtccagtggcaggtccaagcagtgagccaagtgcccacacgagcactcccagcataggaaacagccagccaagcaccccagccccagccctgccggtccaggaccctcagcttctgcaccactgccagcactgtgatatgtactttgcagacaacatcctttacactattcatatgggatgtcatgggtatgaaaatccttttcagtgtaatatatgtggatgcaaatgtaaaaacaagtatgattttgcctgtcattttgcaagagggcaacataaccaacattgattgaaaatagtcatattttacttagttttgctgtttttgtggtttggttttttttgttttttgttttggtcatccctaataaagtgtctgctaattcaaaaaaaaaaaaaaaaaaaaaaaaaaaaaaaaaaaaaaaaaaaaaaaaaaaaaaaaaaaaaaaaaaaaaaa

SEQ ID NO: 321 - protein, 419 aa, Homo sapiens
MGEKKPEPLDFVKDFQEYLTQQTHHVNMISGSVSGDKEAEALQGAGTDGDQNGLDHPSVEVSLDENSGMLVDGFERTFDGKLKCRYCNYASKGTARLIEHIRIHTGEKPHRCHLCPFASAYERHLEAHMRSHTGEKPYKCELCSFRCSDRSNLSHHRRRKHKMVPIKGTRSSLSSKKMWGVLQKKTSNLGYSRRALINLSPPSMVVQKPDYLNDFTHEIPNIQTDSYESMAKTTPTGGLPRDPQELMVDNPLNQLSTLAGQLSSLPPENQNPASPDVVPCPDEKPFMIQQPSTQAVVSAVSASIPQSSSPTSPEPRPSHSQRNYSPVAGPSSEPSAHTSTPSIGNSQPSTPAPALPVQDPQLLHHCQHCDMYFADNILYTIHMGCHGYENPFQCNICGCKCKNKYDFACHFARGQHNQH

SEQ ID NO: 322 - DNA, 5085 bp, Homo sapiens
ggatcccccgggctgcaggaattcggcacgaggggagttcggcgtttgctggggctgcagcagctgaagtgtagtgttttcttgggactggcggtctgcacttctctcccgggttccatctccccccgcccggtggtgaggccctcgaggagggctcggacgggtgtagcgatccgcgctagaggaagacgaggcccgggaacgcatgtcccccagggcaggttagggggctggaggggtcaaatcccggggtacttgtggagactctttagcgtggcttcttctctctgctgagaccccgagagctttcccagttctcctcccaggaccaccggggttcctgaagatcgggacttttctgcgcccctccaccaacagcccatctcctgtctatgaagaaagacccttcgtagaaacaacttccccgctgctgacgcgttttcccgtcccgtccccgaagtagtctactatgacctcgttgtgagcctctgaacgattttgacactttcccgaggcctagggtattatatcctaaccttactaaagaccacagaggtgcttgccattatgggaaatcagcttgctggcattgctccctcccagatcctttctgtagagagttatttttcagatattcatgactttgaatatgataaaagcctggggagtactcggttttttaaagttgctcgagccaagcaccgagaaggcctggtcgttgtgaaggtttttgcaattcaggatcccacattgcctttaaccagctataaacaagagctggaggaactgaaaatcaggcttaattctgcacagaattgtctacctttccagaaagcatcagaaaaagcatctgagaaagcagctatgctctttaggcagtatgtgcgagacaatctctatgatcgcatcagtacccgtccattcttgaataacattgagaagcgctggattgctttccagatcctgacagctgtggaccaagcacacaaatctggagttcgtcatggggacatcaagactgagaatgtgatggtcaccagttggaattgggttcttctaactgattttgccagttttaagcccacttatcttccagaagacaacccggcagatttcaattatttctttgacacatcacggaggagaacttgctatattgctcctgaacgttttgttgatggtgggatgtttgccactgagttagaatatatgagagatccttcaactccgcttgtagacttaaatagcaatcagagaacaagaggagagttgaagagagcaatggacatcttttcagcaggttgtgtgatagctgagctttttacagaaggtgtaccattatttgatctctctcaacttttggcttatagaaatggacattttttccctgaacaagtgctaaataaaattgaagatcacagtatcagagaattggtaactcagatgattcaccgtgagccagataaacgtttagaggcagaagattacttaaaacagcagcgtggcaatgcctttcctgaaatattttacacttttcttcagccctacatggcccagtttgccaaggaaacgtttctttctgcagatgagcgtattctggttatacggaaggatttgggcaacattattcacaatctctgtggacatgatctgccagaaaaagccgaaggagagcctaaggaaaatgggctggttatcttggtatctgttataacatcctgcctacagacccttaaatactgtgattccaaactagctgctttggaactgattcttcatttggctccaagattaagtgttgaaatccttttggatcgtattactccatatcttttgcatttcagcaatgactctgttcctagggtgagggctgaagccttgaggacgttgaccaaagttcttgctctcgtcaaagaggttcctcgtaatgatatcaatatttatccggaatacattctgccaggcatagcccacttagcccaagatgatgctactatcgttagactagcctatgctgaaaacatagctctgctggcagaaacagctctgagattcctggaattagtacagttaaaaaatcttaatatggaaaatgaccccaataatgaagaaatagatgaggttacacatccaaatggaaattatgacacagagctccaagccttacatgaaatggtccagcagaaagttgttactttgctaagtgaccctgaaaatattgtaaaacaaaccttgatggaaaatggaataacacggctgtgtgtattctttggacgtcagaaagccaacgatgttttgttgtcccacatgattactttcctaaatgataagaatgattggcatctacgtggagcattttttgatagtatagttggtgttgctgcctatgttggctggcaaagctcctcaattctcaagcctctgctgcaacaaggtcttagtgatgctgaggaatttgtcattgtgaaagctctttatgcccttacttgtatgtgccagttaggactgctacaaaaaccccatgtttacgaatttgccagtgatattgcccccttcctgtgtcatcccaatttatggatacgttatggtgccgtgggatttatcacagtggtagctcgtcaaataagtacagctgatgtctactgtaaactgatgccttatcttgacccatatattacccaaccaataatacagattgaaagaaaacttgttctgctcagtgttttaaaggaaccagtaagtcgttctatatttgattatgctttgaggtctaaagatattactagcttgttcagacatcttcacatgcgtcagaagaaacgaaatggttctcttcccgactgccctccgccagaggatcctgccatagcacagcttctgaagaagttgctctcacagggaatgacagaggaagaggaagacaaacttctggcactgaaagacttcatgatgaaatctaataaagcaaaggccaatatagtggaccagagccatcttcatgatagtagtcagaaaggtgtaattgacttggcagctttaggcataactgggagacaagttgatcttgttaaaaccaaacaagaaccagatgacaaacgggccagaaaacatgtaaaacaagactcaaatgtaaatgaagaatggaaaagcatgtttgggtcactggacccaccaaacatgccacaggccctacctaaagggagtgatcaggaggtgattcagactgggaaacctcctcgttccgagtcctctgctggcatttgtgtccctttgtcaacttcttcacaggttccagaagtgacaactgtccaaaataaaaaaccagtaataccggttttaagtagtacaatcttaccatccacctatcagattcgaattacaacttgtaaaactgaacttcagcaactcatccagcaaaagcgggagcagtgcaatgctgagagaatagctaagcagatgatggaaaatgctgaatgggagagtaaaccaccaccacctggatggcgtcctaaagggctgttagttgcccatcttcatgagcataaatctgctgtgaatcgaattagagtctctgatgaacactcactttttgcaacatgttcaaatgatggcacagtgaaaatctggaacagtcaaaagatggaggggaagaccaccactaccagatctattcttacatacagccgaattggaggacgagtcaagacgctcacattctgccaaggctcccactatttagccatagcatctgataatggtgctgtccagcttcttggaattgaggcttctaagctgcccaagtctcctaaaatccatcctctacaaagcagaattctagatcagaaggaggacggttgtgttgtggatatgcatcacttcaactctggagcacagtctgttcttgcctatgccactgtgaatggctctctggttggctgggaccttaggtcttcaagcaatgcgtggactttaaagcatgatttaaagtcgggcctcatcacttcctttgctgtggacatccaccaatgctggctctgcattggtacaagcagtggtaccatggcttgttgggacatgaggttccagttgccaatttcaagtcactgtcatccttccagggctcgaatcagacgcctctcaatgcaccctctgtatcagtcctgggtgattgcagctgttcagggcaacaacgaagtgtccatgtgggacatggagactggtgacagaagatttactctctgggccagcagtgcaccaccactttctgaattacagccttctcctcatagcgtccatggtatctactgtagtcctgcagatggaaatcctatcctactaacagctggctcagatatgaaaataaggttttgggacttggcttacccagaaaggtcctatgttgttgcaggaagtactagttccccatctgtgtcctactacaggaaaataattgaaggcactgaagttgtccaggaaattcagaataagcagaaagtaggaccaagtgatgacacccctcgaaggggcccagagtccctgcccgtgggacatcatgacatcatcactgatgtcgccacattccagaccacacagggcttcatcgtaactgcttctagagatgggattgtgaaggtgtggaaataaaacctactgatttgtataaattttaatagttataaatataatactataactcgagaaaaggcatttctagagaacagattcatttgcttaattttcaaaattatgtctccatattactgtttcatgactgactgactaaatgacacccaaaatggttaagatgtacttgactagtttacttatgcatctctttgcaagaatcagccagccaacaatgtctgggatttttattgtatatgttatagaggtgagaaatgtaaaatatgaaaatgaatatgtttattttgtattgaaaaagatggttgaaaagatggttgtaagctattatagtataaacacatttttgctattaaaaatgctattcaaagcagttaaactgtaaaaaaaaaaaaaaaaaaaaaaaaaaaaaaaaaaaaaaaactcgagggggggcccggtacc

SEQ ID NO: 323 - protein, 1358 aa, Homo sapiens
MGNQLAGIAPSQILSVESYFSDIHDFEYDKSLGSTRFFKVARAKHREGLVVVKVFAIQDPTLPLTSYKQELEELKIRLNSAQNCLPFQKASEKASEKAAMLFRQYVRDNLYDRISTRPFLNNIEKRWIAFQILTAVDQAHKSGVRHGDIKTENVMVTSWNWVLLTDFASFKPTYLPEDNPADFNYFFDTSRRRTCYIAPERFVDGGMFATELEYMRDPSTPLVDLNSNQRTRGELKRAMDIFSAGCVIAELFTEGVPLFDLSQLLAYRNGHFFPEQVLNKIEDHSIRELVTQMIHREPDKRLEAEDYLKQQRGNAFPEIFYTFLQPYMAQFAKETFLSADERILVIRKDLGNIIHNLCGHDLPEKAEGEPKENGLVILVSVITSCLQTLKYCDSKLAALELILHLAPRLSVEILLDRITPYLLHFSNDSVPRVRAEALRTLTKVLALVKEVPRNDINIYPEYILPGIAHLAQDDATIVRLAYAENIALLAETALRFLELVQLKNLNMENDPNNEEIDEVTHPNGNYDTELQALHEMVQQKVVTLLSDPENIVKQTLMENGITRLCVFFGRQKANDVLLSHMITFLNDKNDWHLRGAFFDSIVGVAAYVGWQSSSILKPLLQQGLSDAEEFVIVKALYALTCMCQLGLLQKPHVYEFASDIAPFLCHPNLWIRYGAVGFITVVARQISTADVYCKLMPYLDPYITQPIIQIERKLVLLSVLKEPVSRSIFDYALRSKDITSLFRHLHMRQKKRNGSLPDCPPPEDPAIAQLLKKLLSQGMTEEEEDKLLALKDFMMKSNKAKANIVDQSHLHDSSQKGVIDLAALGITGRQVDLVKTKQEPDDKRARKHVKQDSNVNEEWKSMFGSLDPPNMPQALPKGSDQEVIQTGKPPRSESSAGICVPLSTSSQVPEVTTVQNKKPVIPVLSSTILPSTYQIRITTCKTELQQLIQQKREQCNAERIAKQMMENAEWESKPPPPGWRPKGLLVAHLHEHKSAVNRIRVSDEHSLFATCSNDGTVKIWNSQKMEGKTTTTRSILTYSRIGGRVKTLTFCQGSHYLAIASDNGAVQLLGIEASKLPKSPKIHPLQSRILDQKEDGCVVDMHHFNSGAQSVLAYATVNGSLVGWDLRSSSNAWTLKHDLKSGLITSFAVDIHQCWLCIGTSSGTMACWDMRFQLPISSHCHPSRARIRRLSMHPLYQSWVIAAVQGNNEVSMWDMETGDRRFTLWASSAPPLSELQPSPHSVHGIYCSPADGNPILLTAGSDMKIRFWDLAYPERSYVVAGSTSSPSVSYYRKIIEGTEVVQEIQNKQKVGPSDDTPRRGPESLPVGHHDIITDVATFQTTQGFIVTASRDGIVKVWK

SEQ ID NO: 324 - DNA, 854 bp, Homo sapiens
gaattcccaactctggagtcctctgagagagccaccaaggaggagcaggggagcgacggccggggcagaagttgagaccacccagcagaggagctaggccagtccatctgcatttgtcacccaagaactcttaccatgaagaccctcctactgttggcagtgatcatgatctttggcctactgcaggcccatgggaatttggtgaatttccacagaatgatcaagttgacgacaggaaaggaagccgcactcagttatggcttctacggctgccactgtggcgtgggtggcagaggatcccccaaggatgcaacggatcgctgctgtgtcactcatgactgttgctacaaacgtctggagaaacgtggatgtggcaccaaatttctgagctacaagtttagcaactcggggagcagaatcacctgtgcaaaacaggactcctgcagaagtcaactgtgtgagtgtgataaggctgctgccacctgttttgctagaaacaagacgacctacaataaaaagtaccagtactattccaataaacactgcagagggagcacccctcgttgctgagtcccctcttccctggaaaccttccacccagtgctgaatttccctctctcataccctccctccctaccctaaccaagttccttggccatgcagaaagcatccctcacccatcctagaggccaggcaggagcccttctatacccacccagaatgagacatccagcagatttccagccttctactgctctcctccacctcaactccgtgcttaaccaaagaagctgtactccggggggtctcttctgaataaagcaattagcaaatcaaaaaaaaaaaaggaattc

SEQ ID NO: 325 - protein, 144 aa, Homo sapiens
MKTLLLLAVIMIFGLLQAHGNLVNFHRMIKLTTGKEAALSYGFYGCHCGVGGRGSPKDATDRCCVTHDCCYKRLEKRGCGTKFLSYKFSNSGSRITCAKQDSCRSQLCECDKAAATCFARNKTTYNKKYQYYSNKHCRGSTPRC

SEQ ID NO: 326 - DNA, 1204 bp, Homo sapiens
cggaacgagggcaacctgcacagccatgcccgggcaagaactcaggacggtgaatggctctcagatgctcctggtgttgctggtgctctcgtggctgccgcatgggggcgccctgtctctggccgaggcgagccgcgcaagtttcccgggaccctcagagttgcactccgaagactccagattccgagagttgcggaaacgctacgaggacctgctaaccaggctgcgggccaaccagagctgggaagattcgaacaccgacctcgtcccggcccctgcagtccggatactcacgccagaagtgcggctgggatccggcggccacctgcacctgcgtatctctcgggccgcccttcccgaggggctccccgaggcctcccgccttcaccgggctctgttccggctgtccccgacggcgtcaaggtcgtgggacgtgacacgaccgctgcggcgtcagctcagccttgcaagaccccaagcgcccgcgctgcacctgcgactgtcgccgccgccgtcgcagtcggaccaactgctggcagaatcttcgtccgcacggccccagctggagttgcacttgcggccgcaagccgccagggggcgccgcagagcgcgtgcgcgcaacggggacgactgtccgctcgggcccgggcgttgctgccgtctgcacacggtccgcgcgtcgctggaagacctgggctgggccgattgggtgctgtcgccacgggaggtgcaagtgaccatgtgcatcggcgcgtgcccgagccagttccgggcggcaaacatgcacgcgcagatcaagacgagcctgcaccgcctgaagcccgacacggagccagcgccctgctgcgtgcccgccagctacaatcccatggtgctcattcaaaagaccgacaccggggtgtcgctccagacctatgatgacttgttagccaaagactgccactgcatatgagcagtcctggtccttccactgtgcacctgcgcgggggaggcgacctcagttgtcctgccctgtggaatgggctcaaggttcctgagacacccgattcctgcccaaacagctgtatttatataagtctgttatttattattaatttattggggtgaccttcttggggactcgggggctggtctgatggaactgtgtatttatttaaaactctggtgataaaaataaagctgtctgaactgttaaaaaaaaaaa

SEQ ID NO: 327 - protein, 308 aa, Homo sapiens
MPGQELRTVNGSQMLLVLLVLSWLPHGGALSLAEASRASFPGPSELHSEDSRFRELRKRYEDLLTRLRANQSWEDSNTDLVPAPAVRILTPEVRLGSGGHLHLRISRAALPEGLPEASRLHRALFRLSPTASRSWDVTRPLRRQLSLARPQAPALHLRLSPPPSQSDQLLAESSSARPQLELHLRPQAARGRRRARARNGDDCPLGPGRCCRLHTVRASLEDLGWADWVLSPREVQVTMCIGACPSQFRAANMHAQIKTSLHRLKPDTEPAPCCVPASYNPMVLIQKTDTGVSLQTYDDLLAKDCHCI

SEQ ID NO: 328 - DNA, 3206 bp, Homo sapiens
gtttataacttgaaaaatcctctccgtctcccttccctgcctcctttcctttccctttcctctgccagtacaactagacccggcgtctggcgtccccggtgcccagcattctgcggggcaggcggattaattggaattcttcaaaatgtcaggtgtggtacccacagcccctgaacagcctgcaggtgaaatggaaaatcaaacaaaaccaccagatccaaggcctgatgctcctcctgaatacagttctcattttttaccaggaccccctggaacagctgtccctccacctactggctacccaggaggcttgcctatgggatactacagtccacagcaacccagtaccttccctttgtaccagccagttggtggtatccatcctgtccggtatcagcctggcaaatatcctatgccaaatcagtctgttccaataacatggatgccagggccaactcctatggcaaactgccctcctggtctggaatacttagttcagttggacaacatacatgttcttcagcattttgagcctctggaaatgatgacatgttttgaaactaataatagatatgatattaaaaacaactcagaccagatggtttacgttgtaaccgaagacacagatgactttaccaggaatgcctatcggacactaaggcccttcgtcctccgggtcactgattgtatgggccgagaaatcatgacaatgcagagacccttcagatgcacctgctgttgcttctgttgcccctctgccagacaagagctggaggtgcagtgtcctcctggtgtcaccattggctttgttgcggaacattggaacctgtgcagggcggtgtacagcatccaaaatgagaagaaagaaaatgtgatgagagttcgtgggccatgctcaacctatggctgtggttcagattctgtttttgaggtcaaatcccttgatggcatatccaacatcggcagtattatccggaagtggaatggtttgttatcagcaatggcagatgctgaccattttgacattcacttcccactagacctggatgtgaagatgaaagccatgatttttggagcttgcttcctcattgacttcatgtattttgaaagatctccaccacaacgttcaagatagagagacacagcaagccatcaactatggttaattttgaaaaatggaaaagttggattgggcttacagtcagcactcagttatttgcaagtgtatttctttgctttgtagagtatttttattgggtgttaactttgacagctgagagtgggcttgcaagaacacaatctaaaagtgtgtttcaattgagtatctctctagtagaataggagttcatcctgaaaagctgtgactcattaacccagtaaacatatacaaagtaagcttaaaacactataaacatgagataagggaaaatgaatccagagttctcatattaataggtagtgaaacaataaggctttttagagcagactttgttggcataaaataacctggcttctatccctaaccctttcctacctttcctctccgtcaacatgtcctcatactgaagacaaacttgtttcaatgatagtcttcatttttaaaaacaaaaaggcaggcagacagaaataatgatgttttcttgcactaagaaggtactacttgtacacatatatcaaaacctcattctgcaaagtttttgaaggtttcaatgggaaatttgattttattacaaaataaaacattttttaatgttaaagtttatatattccatgcttgttttctcattcactggcatggatgatcaggagctgcctatatatgaaggcagaatcagactatcaggaaaggagctggccagggccacagccagtcaagatctctgagcaacttagagacattggtgtcattatatgaagcttgcatttaatacatttatacataatacatttgtacatttaattcataacgtctcttggtcacagatgccttatatataaaataagttgccagatctctaagattgcctagtacacctttgtatctcatttgatgtgatacccagaagagatcattgttttttgtttttgtttttgtttttttcaagaagatccttcgtgatcaccatgctgttctcatggtaagaactggagttatgtttttaaatttgaaaatatgacattttatgtagcactatataaaaagtgaaagcgacaaattccaccgctgcttaatactgctttgcttctttttattgacatgatagatacatatgtatctacacagagtaataataataaaacacagtaaacattctatttctctatggtctacagcatgccagtaaataatatgtaggaccaataataaattatcaattacacatttttgtgttaactaattaaaagcatagtgtataagtgagtacactctaattaacttgcttctgttgcactttagttttctacctgcatatggactgcatttttttttttaacacagtcagtatgtagaatgggatgtattcttctgctgctgcttattaaataaagaaagcctgagtgttcttagatggggttattctgagatgagggtcttagcctacagttctttttgaaatgaaaggtgctttgttttttaattatattcatcttttcagggtaaatttgtttttctgagtttctcgtaatgctcatttttacatgctgctactagcttttttttttaaaaaaagtaaaagttgctgctttctaaaatattaattgccttatatttgaaagtgccattgcaatcgtaagtagactatgtatttcctataatgatgtctgatatttaaataggaaatcagacaaacaatattcagaaagtttaagcatataaactttttatttttaacttgcctagatccctgtattccaaaacctgctgcatcataataaatatatctatatatatttagcataagacgtgatatttttaatttcttttttaaaaaattatatttgtctcttagagttaaaattttctttatataatattgtcatatgtcatagttttaatacaattcacatgatttctatgtttcttaatgatattttgttgtgtaaaattgatcggattgattaaaaaacaaattctctggaatttgtgcgttcatgctttttcgtattctttatggcttttaaataaatatacaatggttaatagt

SEQ ID NO: 329 - protein, 329 aa, Homo sapiens
MSGVVPTAPEQPAGEMENQTKPPDPRPDAPPEYSSHFLPGPPGTAVPPPTGYPGGLPMGYYSPQQPSTFPLYQPVGGIHPVRYQPGKYPMPNQSVPITWMPGPTPMANCPPGLEYLVQLDNIHVLQHFEPLEMMTCFETNNRYDIKNNSDQMVYVVTEDTDDFTRNAYRTLRPFVLRVTDCMGREIMTMQRPFRCTCCCFCCPSARQELEVQCPPGVTIGFVAEHWNLCRAVYSIQNEKKENVMRVRGPCSTYGCGSDSVFEVKSLDGISNIGSIIRKWNGLLSAMADADHFDIHFPLDLDVKMKAMIFGACFLIDFMYFERSPPQRSR

SEQ ID NO: 330 - DNA, 2326 bp, Homo sapiens
ccggggctggaggggggcaagcgggttccgaggtgcaaagcctggtgccccgagccctgcggagctcggggccagcatggcccccacgctgcaacaggcgtaccggaggcgctggtggatggcctgcacggctgtgctggagaacctcttcttctctgctgtactcctgggctggggctccctgttgatcattctgaagaacgagggcttctattccagcacgtgcccagctgagagcagcaccaacaccacccaggatgagcagcgcaggtggccaggctgtgaccagcaggacgagatgctcaacctgggcttcaccattggttccttcgtgctcagcgccaccaccctgccactggggatcctcatggaccgctttggcccccgacccgtgcggctggttggcagtgcctgcttcactgcgtcctgcaccctcatggccctggcctcccgggacgtggaagctctgtctccgttgatattcctggcgctgtccctgaatggctttggtggcatctgcctaacgttcacttcactcacgctgcccaacatgtttgggaacctgcgctccacgttaatggccctcatgattggctcttacgcctcttctgccattacgttcccaggaatcaagctgatctacgatgccggtgtggccttcgtggtcatcatgttcacctggtctggcctggcctgccttatctttctgaactgcaccctcaactggcccatcgaagcctttcctgcccctgaggaagtcaattacacgaagaagatcaagctgagtgggctggccctggaccacaaggtgacaggtgacctcttctacacccatgtgaccaccatgggccagaggctcagccagaaggcccccagcctggaggacggttcggatgccttcatgtcaccccaggatgttcggggcacctcagaaaaccttcctgagaggtctgtccccttacgcaagagcctctgctcccccactttcctgtggagcctcctcaccatgggcatgacccagctgcggatcatcttctacatggctgctgtgaacaagatgctggagtaccttgtgactggtggccaggagcatgagacaaatgaacagcaacaaaaggtggcagagacagttgggttctactcctccgtcttcggggccatgcagctgttgtgccttctcacctgccccctcattggctacatcatggactggcggatcaaggactgcgtggacgccccaactcagggcactgtcctcggagatgccagggacggggttgctaccaaatccatcagaccacgctactgcaagatccaaaagctcaccaatgccatcagtgccttcaccctgaccaacctgctgcttgtgggttttggcatcacctgtctcatcaacaacttacacctccagtttgtgacctttgtcctgcacaccattgttcgaggtttcttccactcagcctgtgggagtctctatgctgcagtgttcccatccaaccactttgggacgctgacaggcctgcagtccctcatcagtgctgtgttcgccttgcttcagcagccacttttcatggcgatggtgggacccctgaaaggagagcccttctgggtgaatctgggcctcctgctattctcactcctgggattcctgttgccttcctacctcttctattaccgtgcccggctccagcaggagtacgccgccaatgggatgggcccactgaaggtgcttagcggctctgaggtgaccgcatagacttctcagaccaagggacctggatgacaggcaatcaaggcctgagcaaccaaaaggagtgccccatatggcttttctacctgtaacatgcacatagagccatggccgtagatttataaataccaagagaagttctatttttgtaaagactgcaaaaaggaggaaaaaaaaccttcaaaaacgccccctaagtcaacgctccattgactgaagacagtccctatcctagaggggttgagctttcttcctccttgggttggaggagaccagggtgcctcttatctccttctagcggtctgcctcctggtacctcttggggggatcggcaaacaggctacccctgaggtcccatgtgccatgagtgtgcacaacatgcaatgtgtctgtgtatgtgtgaatgtgagaaaaacacagccctcctttcagaaggaaaggggcctgaggtgccagctgtgtcctgggttaggggttgggggtcggccccttccagggccaggaaggcaggttccctctctggtgctgctgcttgcaagtcttagaggaaataaaaagggaagtgagaaaaaaaaa

SEQ ID NO: 331 - protein, 559 aa, Homo sapiens
MAPTLQQAYRRRWWMACTAVLENLFFSAVLLGWGSLLIILKNEGFYSSTCPAESSTNTTQDEQRRWPGCDQQDEMLNLGFTIGSFVLSATTLPLGILMDRFGPRPVRLVGSACFTASCTLMALASRDVEALSPLIFLALSLNGFGGICLTFTSLTLPNMFGNLRSTLMALMIGSYASSAITFPGIKLIYDAGVAFVVIMFTWSGLACLIFLNCTLNWPIEAFPAPEEVNYTKKIKLSGLALDHKVTGDLFYTHVTTMGQRLSQKAPSLEDGSDAFMSPQDVRGTSENLPERSVPLRKSLCSPTFLWSLLTMGMTQLRIIFYMAAVNKMLEYLVTGGQEHETNEQQQKVAETVGFYSSVFGAMQLLCLLTCPLIGYIMDWRIKDCVDAPTQGTVLGDARDGVATKSIRPRYCKIQKLTNAISAFTLTNLLLVGFGITCLINNLHLQFVTFVLHTIVRGFFHSACGSLYAAVFPSNHFGTLTGLQSLISAVFALLQQPLFMAMVGPLKGEPFWVNLGLLLFSLLGFLLPSYLFYYRARLQQEYAANGMGPLKVLSGSEVTA

SEQ ID NO: 332 - DNA, 1285 bp, Homo sapiens
gcgcgagcaagatggccaccaccaagcgcgtcttgtacgtgggtggactggcagaggaagtggacgacaaagttcttcatgctgcgttcattccttttggagacatcacagatattcagattcctctggattatgaaacagaaaagcaccgaggatttgcttttgttgaatttgagttggcagaggatgctgcagcagctatcgacaacatgaatgaatctgagctttttggacgtacaattcgtgtcaatttggccaaaccaatgagaattaaggaaggctcttccaggccagtttggtcagatgatgactggttgaagaagttttctgggaagacgcttgaagagaataaagaggaagaagggtcagagcctcccaaagcagagacccaggagggagagcccattgctaaaaaggcccgctcaaatcctcaggtgtacatggacatcaagattgggaacaagccggctggccgcatccagatgctcctgcgttctgatgtcgtgcccatgacagcagagaatttccgctgcctgtgcactcatgaaaagggctttggctttaagggaagcagcttccaccgcatcatcccccagttcatgtgccagggcggtgatttcacaaaccacaatggcactgggggcaagtccatctatgggaagaagttcgatgatgaaaactttatcctcaagcatacgggaccaggtctactatccatggccaactctggcccaaacaccaatggctctcagttcttcctgacatgtgacaagacagactggctggatggcaagcatgtggtgtttggagaggtcaccgaaggcctagatgtcttgcggcaaattgaggcccagggcagcaaggacgggaagccaaagcagaaggtgatcatcgccgactgtggggagtacgtgtgaggcggcactctctctgcttccccctccgctcttgaccctgcatatccaggaaggaactgccagcctcagaggaggcagcaccgagggtgcctgtttgaagcaagcagcatttgggatatgtgcccttcctcagggtctgcttggagcagctcctctgcaggcacagcctggactattcccaggcacagctgtgggcccaggagccagctcaggtgctcccctccaccatgggcaggctgtgcaaaaaagccactggcttttctcagcatttgctgctgggcctctcctgggactaccagtgtggctcttacgtgttttctttgctaaaataaaccctagttcttatattaaaaaaaaaaaaaaaaaaa

SEQ ID NO: 333 - protein, 301 aa, Homo sapiens
MATTKRVLYVGGLAEEVDDKVLHAAFIPFGDITDIQIPLDYETEKHRGFAFVEFELAEDAAAAIDNMNESELFGRTIRVNLAKPMRIKEGSSRPVWSDDDWLKKFSGKTLEENKEEEGSEPPKAETQEGEPIAKKARSNPQVYMDIKIGNKPAGRIQMLLRSDVVPMTAENFRCLCTHEKGFGFKGSSFHRIIPQFMCQGGDFTNHNGTGGKSIYGKKFDDENFILKHTGPGLLSMANSGPNTNGSQFFLTCDKTDWLDGKHVVFGEVTEGLDVLRQIEAQGSKDGKPKQKVIIADCGEYV

SEQ ID NO: 334 - DNA, 11102 bp, Homo sapiens
ggcgggaggagtaaagatggcggcgcgagggtctccgccctctgctccgggctgaagcgctctgagagaggcggcagcggcaactcgagccccaacagtaatttagtgttggtagttttggcagcagctgccgaggccggagcaatggcggaactggagcacctaggagggaagcgggcagagtcggcgcgaatgcggcgggcagagcagcttcggcgctggcggggctcgctgacagagcaggagcctgcggagcgacgaggcgcggggcggcagccgctgaccaggcgcgggagccccagggtccgcttcgaggacggtgctgtctttctggccgcctgctctagcggggacaccgacgaggtgagaaagcttctggcaagaggtgctgatatcaacacggtcaacgtggacggcttgacagccctgcaccaggcatgtattgatgaaaatttggacatggtgaagtttctggtggagaacagagccaatgtaaaccagcaagacaacgagggctggacaccccttcatgcagcagcttcctgtggctatctcaacatagcagagtatttcattaatcacggagccagtgtaggtattgtcaatagtgaaggtgaagttccctctgaccttgcagaagagccagccatgaaggatcttcttctggagcaagtaaagaagcaaggaattgatctagagcagtcaagaaaagaagaagagcagcagatgttgcaggatgcccgccagtggctcaacagtgggaaaatagaggatgtgaggcaggctcgctcaggggctacagcccttcatgtggctgctgccaagggctactctgaagtcctcagacttttaattcaggctggctatgaactcaatgttcaggattatgatggctggactcccctccatgctgctgcacactggggagtgaaggaggcttgctccatcctggcagaagcactttgtgacatggatattcgaaataaactgggccagacaccatttgatgtggctgatgagggtctcgtggagcatttggagttgctccagaagaagcagaatgtgcttcgaagtgaaaaggagacacggaataaactcattgagtcagatctgaacagcaagattcagagtgggttctttaagaacaaagagaagatgctctatgaggaggagacacctaagtcccaagaaatggaggaagaaaataaagaatctagtagctccagctcagaggaggaggaaggtgaagatgaagcttctgagtcagaaactgagaaggaggcagataaaaagccagaagcctttgtcaatcattccaactctgaaagcaagagtagtatcacagagcagataccagcaccagctcaaaataccttctctgcctcttctgctaggaggttctcttctggcctttttaacaagccagaagagcccaaagatgaatctccttcttcatggagattgggactgagaaaaactggcagccacaacatgctgagtgaggtggccaattccagggaacctataagggaccgaggctcttccatctatcgctcctcttcaagccctcgaatttctgctctactggacaacaaagataaggagagagaaaacaaaagctatattagttcactagcaccccggaagctcaacagcacaagtgatattgaagaaaaggagaacagagaatcagctgttaatctagtgaggagtggctcctatacccggcagctatggagggatgaagcaaaaggaaatgaaatcccacagacaattgctccctccacctatgtatcaacttacttgaaaaggactcctcacaaatcccaggccgacacaacagcagagaaaacagcagacaatgtctcttctagcaccccgctctgtgtgatcaccaatcgccctcttcctagcactgccaatggggttacagctactcctgtgctctccattactggaacagattcctctgtggaagccagggagaagaggaggtcctatctgactcctgtacgggatgaggaagcagagtctttacggaaagcacgctccagacaagctcggcagacacgaaggtctactcaaggtgtcaccctaacagaccttcaagaagcagaaaggacattcagccggtcgagggcagagaggcaagctcaggagcagcctcgtgagaagcccacagacactgaagggcttgaggggagccctgagaagcatgagccctcagcagttccagcaacagaagctggggagggccagcagccctggggcaggagtctggatgaagagcctatctgtcatcgcctgaggtgcccagctcagccagacaaacccaccacgccagcatctccttctacgtcaagaccctcactctacaccagttcccacctgctatggacaaatagattttcagtccctgattctgagagttcagagactaccacaaacactacaactgcaaaggaaatggacaaaaatgagaatgaagaagcagatttggatgagcagtcctctaagaggctgtccatccgagagaggaggcggcccaaggaacgacgaagaggcacaggcatcaatttctggacaaaggatgaggatgaaactgatggctctgaagaggtcaaagaaacgtggcatgaaagactttctaggttggaatcgggaggtagtaatcctacaaccagtgattcttacggtgaccgggcttcagcaagagcccgtcgggaggcccgggaggcccgcctagccaccctgaccagccgtgtagaagaagacagcaacagagattataaaaaactctatgagagtgctctgactgaaaaccaaaaactgaaaacaaaacttcaggaagcccagctagagctagcagatataaagtccaagcttgagaaggtggcccagcagaaacaagaaaagacctctgaccgatcatcagtgctggagatggagaaacgggagaggcgagccttggagcgcaaaatgtcagaaatggaggaagaaatgaaggtgttaacagaactgaaatccgacaaccagaggctgaaagatgaaaatggtgccctcatcagagtcatcagcaaactgtccaagtaggctaggctccagatttatgaggaaagaaagggacagcatttgctgcccccacccctcttttccagtccttgccttccaaccaaaagaaatggatgttttggtggaaggacacttctttctatcaccctcttcagtcacctctatacactctacattttctctgcactttcaatgccctgttcttccaaacccctatcccaagttttatgacagttttaattgaagcatgattgtggtaattcgagccatctggagaatgctctggggagtacaccaggctcagctgtggacccctcaacttcctgctgctcagctactttgtccacattggatttggtccaaacatgtaagacttctaccctaatcagtatccttcagctttttacattaacccagtgtcctctgatataggtgagtcttgtggtagccactccaggatcctgattggggtgccaagagaaacagcaggatgttgaattgatcatcagatgccctctggaatggttagcatccaaggtgacagtgactgcattgaggcgctctattcttcttcacctctcaggaactgacttttattttttctatcaacacccagtaatctccctaactagttttaacccttattcctccctcatacctagccatttctccaaggcgcaaatggccctggcttcatttattcctttcctttctatccttttatatttttcccttccccaccccctcactcaatggtataaaagctaggacagagcacctgacctcagttgtctttggccattgtgggaagtcattattctggagacaagaaaatcatcactctggtgccttggtggcagcaccactgcctgctccctggaaggtagactatggcataagtgtcagctcattgttttcgtctcccacttatcttcccccttcaaagtgattttctttataagaaaatttgggctctgaatactccattctgcctcacttccttgaccttgttttcctctcttcgccctgacacctgcttctaatgagaaatgaagtcagtgcaaggaggaatgagaggtggggaggggagattgttgagagatggactaggaagtggaagcaggctggaaagacacatatggcgaaagtcaagtatctgaggccacttgcaacattgtgacaaagaagatggaagatagcagcctactgggctgtgagaatagtggtgaatttgattatttccagtggttagatttagcagagagatttactttcttagaaattaataggggaaatggcacttaatagaggtttaatggaatgaagtactttcaacccattgatgagagtcatggaagtttagagtggcaagacccagaggtcattaggtccagctttctattattgtgtcacagggacccctgctaccacagctttcacccatgggcatggtcaggtagcctctggtggctatgcatttattactcaaaagttgggcaactctaataacgagagagtttttcctcatatcagctgaagtctgcctgtggattctccttgtagtccagatctactatctgcaactctttaacggcacttgagatatgtgcagtgggtggtctccccctcagtcttactttgagctgctgttactctagtcctttaagtcattcctcatatggcatgcttttcttacctgtcacatcttggccatcctcctctagacaaaaccagcctttaaaatatcatgtccaggcctggaaagaatacaaatccagtgcaaaattaaaccattagttcttgatgataacctagcattaatacttacagtattttctttttgtaggagttttatcccttggttcacttgagtgtgcaagtcattaaatcctcatcattttagggttgccagtgatattcagtgtttagagtggttcattcccttaatatatactacctctgtctgttaattctttcctaacatgacatgtagctctccatggtcctccctctgaaacaccacatgctgtttaaactagaagctgtaattcaagatcccaattccaccaggtgcagtggctcatgcctgtaatcccagcacttcaggaggccgaggtggacagatcacgaggtcaggagttcgagaccatcctggctaacacggtgaaacccaatctctactaaaaatacaaaaaattagccaggcgtggtggcaggcgcctgtagtcccagctactcaggaggctgaggcaggagaatggcgtgaacccgggaggcggagcttgcagtgagccttgatcacgccactgcactccagcctgggtgacagagcaagactccatctcaaaaaaaataataataataaataaataaaaaatcccaattacagaacaggagatatgtttcctctgacaaaaccccatttttagagtgtataaaattctgtctttcatttccaaccatttttcaagagaagctgctactatcttgagacttcgtattatcatgggagtactgtaagttcagttctcagggaatgctaaattagagtaataagttttatatccttcattctgggagaggaaatcaacataaggtgttgactaattgattatcctggaacattttgaatattggggaaggaagatgatacttctttctcaagaaaagaaaattggattattaggaatacatcttgacccttttccactcaatagaccagggaaaggggttacagagagcctcctcagatctgtttgtgcctttcaaaagtactgggggcagattctcaaaactcttagattggtgttgcatccctgccacttcacatgacccttccatgttaaagctgacttttcttgccagaaagttttccttgtgacaagaaatttgcaagcttttcaatctcaggaatactggattctatagccaagaactcatgaaagtaagtgtaaactatcctaggtaatttcaggtactttctcttatgcaattaattttattaactgatttctggtctatctccagagataaaataccattccttcacaactgtattgtctggaagccccatgagatggtaattataggccttctactagccagcagttctctctggatactggcatcagcaggtctcctttttcttgtgctgcttggacaggtacctactgctggcctcttcagtggccacaatcctcagtcctcacctgctggtttggagactcatgagcaccccaggcagctcaagctgaataaatagctgcagacatggccaacaacatggggctcaggtctgtcacttaacttagagtctttacatgaaatatcagaatgggaaagagaatgttcctggtaaaactctgttttcattaatttgttatttttcaaaaaccgagccacacctttggaagtaatgatttggccattccagagattctggggctaaagtttgtttttccagggctgctgatccttttccagatagctccagagtatgatgaccccagccccatcccaatctctagcgaaagggttatgcaaatctcagggtgttgcctctaaagaatctaaagaatagacatgctttgggcttactcagtgtaccagattctctagtgggccattctcatttgatgttccctagaacctccctgtcttccaactgcaggatgtgtttacttctcttctgggcttcccctggtttctgtcctagttcccaccccaagtttaagaagacttagattcatttattgctatctgaggccactagtgagatttcagatctctcttttgcaacattttacccatttcccttccccaaaccatgtgcttattagatggttccactcaggaagcaaggaagctaaaactcaagttaatggtctgtggatcccacgaaagtgtgtgtaaactactgactgtttctccactagaggcatttaattgagccaaagatgatggaagaagaaactctcaaagccatgtactttgttaggtgtctggatttttggcctgtttgcagcctctcctagccacagacagacactgtctcctctcagagaaaggccagtgtttcggtccaggccactggtgagtgtcggcacccttgaggtgggcatggagtgagcagaagaagcctggagaagagagaactatttaaaagtgttgccagttattcagcttccaggcggctttgcacctccaaaggtgcaaaaaggaaaaagaaagcagaaaggattcagcatttaagcagaaagaaaagggaaattctactctaccagatgagccactggttccactggagcttatcagtgaagtaacactgcaggagccctggtatccttccctcagagatatcatcaggggccctcaaaccccattgtttatgccagcactgaccgcactttaagcacacacttaccaatcagaggtcgtgtaattggcctaaatctaggcccagttattactacaaatcttagtcaccatactctctcgcccaggctggagtgcagtggtgtgatctcagctcactgcaacctccacctcccaggctcaagggatcctctcacctcagctcccgagcagctaggactgcaggtgtgcaccaccatgcccagctaatttttgaatttttttgtagagatggggttttgccatgttgcccaggctggtctgaagctgctgggctcaagcaatccacctggctgggcctcccaaagcgataggattacaggcgtaagggcccacgcccagcctaccatactgattttcaaggcagggtctaacccttcataagatgtgagttcttccaacccaataagcaggcagctttgaggacaaaaaggcaacattaaaagataagaccctagaagtcagaacatctgtattccaaggccaccccttctccttttagtcatgtgactttgggcaggtcaccctccctgtctgtaaaatgaggttggactggataatctttatgtgccctttccttttggcttaaaattctgtgatttattcattcttaggaagatcagcatatttattgggatttctgcttcaaaaattctttctaacctcaaaaatccaagtccagaattttttgttttcttctggatttaaactgtttaatatgagcacatcaaggttgacttctcatcctttttgggaagtgaatttaatattgagggtaattgaatgatgttgcaatggctttccctcctgctggcttggtaagaatattaaagcctgcagaggtggaaattggagctcatggagaaatggatagaaagcaatttgttgcaggcagcctttggacaagttgttttaataggaaatagacctgctgcttcataggtttcctcaaccacctttcctcagctttcttaaaatgggatctacattggctcttcacacccaaatagcagactaatcgtttttctgcttagcaccgtctggttcattgtcttgaactctgccttacagcagcaagaaaattttcctcgacaagaacctcaatctttagttccattgagctccccctctggattttggacttaccagaagtaggaggttctgataccattcaagatggtctttccttcaaagcaggtctgaagaggagactaccaaagcagtgtttacaaacccagagtccacacaaccatattgcatagaacagcacttggctttcacaagcctcctacaggacctggtgtaattggagtgaaagggcagagaccctggaagtggaggtggctgtgtgctgcgatgggaagaaggcagaaggcccaggggctttggacatagagcagggtggaagctgcaagtactgggaaggaagagagtttcacagaaacaaagctttgtcacacagaaatgagttctgtctcactggtgacttcatccctcaggctccagctgagcagagattttaatcagcttccttaatgggtattgacactgctcaggaagcagtagaccctgtcagggacagctattgatcttttgtgttctgattagattggaaaatagatcaacttcattgtagtccaggaactgttggtcacagctactaggaatgaggtgatttctgagggctgagaaaaaacacagaatcttggccagcagccagcagctgcatggtgaaagatgcattcacttctcctttgagagttggggttgagggcaaacatagaacccaggtttggcttacaacccagtgtcccggaagccctccttcgggagaactgtaagtaagaggtgggtgtgtctaaagacaataccattaatgaatgttctggccttacctaaaaaggtttagcaatttggggataactcttggatctagcttatgtgcgttcacatgcacatttgctagcccagagcttttaaaatgaggtctggcatatacttgattacaaatgaaaactcagaaaccaattttatttattaaatcatatcttttgtttttccccctcccttctaatcccccaaaggacctatttgagctgttccccaattcatctgcttattttggaccatgaatctgccagagtgatattttctgttatttctcctccaaatttttccctgatgtttccaataaagatttacttgggtggccccttaaggtgacatcaggatgctcttatgtccttccagaataagcatacacttcactcctctccctttcatctccctctgcattcttaattccttgcttttctcacttggagccgagggtgctttagagaggtggttttccatgaatcagccaagattcctgtagaagttgggtataccaaccaccaccaccaccgccccctattccagtttcaaagctcctcggctatgctaatgtcccctcagagatgaggtttgacttttaggcccgtatgactcctccatagcctggccaaggagaccatgagtagccatgtctggtttactctttatcctgagactgtttatagcttaaaacagaagtgtgtcttcccagcacaaacctaatcaatcagtgtatcagtgcatctggtggcaacagctcagcccattcaaagagcaaggattcaggaaaggcacactgatggtggggagcctcttaagagcctctaatgttctcccaaaaccagagttgagagtcggagtgccagtcgtcggggcccactattcctgaataagggacatgcaagggccagaagtagcttgactctcgcctaaatatctgtgcctttgcctgtcctttctcccactctactgaaacccggaacagattcccgcttgccttctgatgaagagaggttaggtaaagagagtttggaggaaaaaagacaccaggaggcaggctgcggggtaggagagggttctgagaggaggcagcaatccagaatacctccttttctagccagcatcccttgaacttttgaaaggttgtgcctaccactggctggcacaccagggcaatgatttccctgcagaaggaaggaaagaatgtttcacccttgcatccttcttggagaagctacagcctgtgctcagttgagtggttcacactcagactttggctttatggttttccttcctccttgtctttgccctgaccttgatcaacaggggtgaaaagaaccaccctgaggtttccatgcctctcccattttagtggtagcattttgtgtctttactccacccttcaccctagttccaccaaggttcacacaccagatgtaactgtttttcagctgagttgtatggattaacttcagtccactgtaaatacacctgggatggggtggggttggggttgtttagggagaagcagccagacttgctttgtgaactgaatgtatttttatgcaattttgagtggcctttcaaccctaagatgaatggttttgttttactggttgttgttatatagttttgagtattctgtgtttgaaagtttgggaataataatattcacttctatatgatgcctgtaaacacaacagtatttataaatgagtaaataaaactgtgttttaactttg

SEQ ID NO: 335 - protein, 982 aa, Homo sapiens
MAELEHLGGKRAESARMRRAEQLRRWRGSLTEQEPAERRGAGRQPLTRRGSPRVRFEDGAVFLAACSSGDTDEVRKLLARGADINTVNVDGLTALHQACIDENLDMVKFLVENRANVNQQDNEGWTPLHAAASCGYLNIAEYFINHGASVGIVNSEGEVPSDLAEEPAMKDLLLEQVKKQGIDLEQSRKEEEQQMLQDARQWLNSGKIEDVRQARSGATALHVAAAKGYSEVLRLLIQAGYELNVQDYDGWTPLHAAAHWGVKEACSILAEALCDMDIRNKLGQTPFDVADEGLVEHLELLQKKQNVLRSEKETRNKLIESDLNSKIQSGFFKNKEKMLYEEETPKSQEMEEENKESSSSSSEEEEGEDEASESETEKEADKKPEAFVNHSNSESKSSITEQIPAPAQNTFSASSARRFSSGLFNKPEEPKDESPSSWRLGLRKTGSHNMLSEVANSREPIRDRGSSIYRSSSSPRISALLDNKDKERENKSYISSLAPRKLNSTSDIEEKENRESAVNLVRSGSYTRQLWRDEAKGNEIPQTIAPSTYVSTYLKRTPHKSQADTTAEKTADNVSSSTPLCVITNRPLPSTANGVTATPVLSITGTDSSVEAREKRRSYLTPVRDEEAESLRKARSRQARQTRRSTQGVTLTDLQEAERTFSRSRAERQAQEQPREKPTDTEGLEGSPEKHEPSAVPATEAGEGQQPWGRSLDEEPICHRLRCPAQPDKPTTPASPSTSRPSLYTSSHLLWTNRFSVPDSESSETTTNTTTAKEMDKNENEEADLDEQSSKRLSIRERRRPKERRRGTGINFWTKDEDETDGSEEVKETWHERLSRLESGGSNPTTSDSYGDRASARARREAREARLATLTSRVEEDSNRDYKKLYESALTENQKLKTKLQEAQLELADIKSKLEKVAQQKQEKTSDRSSVLEMEKRERRALERKMSEMEEEMKVLTELKSDNQRLKDENGALIRVISKLSK

SEQ ID NO: 336 - DNA, 963 bp, Homo sapiens
atgagttcctgcaacttcacacatgccacctttgtgcttattggtatcccaggattagagaaagcccatttctgggttggcttccccctcctttccatgtatgtagtggcaatgtttggaaactgcatcgtggtcttcatcgtaaggacggaacgcagcctgcacgctccgatgtacctctttctctgcatgcttgcagccattgacctggccttatccacatccaccatgcctaagatccttgcccttttctggtttgattcccgagagattagctttgaggcctgtcttacccagatgttctttattcatgccctctcagccattgaatccaccatcctgctggccatggcctttgaccgttatgtggccatctgccacccactgcgccatgctgcagtgctcaacaatacagtaacagcccagattggcatcgtggctgtggtccgcggatccctcttttttttcccactgcctctgctgatcaagcggctggccttctgccactccaatgtcctctcgcactcctattgtgtccaccaggatgtaatgaagttggcctatgcagacactttgcccaatgtggtatatggtcttactgccattctgctggtcatgggcgtggacgtaatgttcatctccttgtcctattttctgataatacgaacggttctgcaactgccttccaagtcagagcgggccaaggcctttggaacctgtgtgtcacacattggtgtggtactcgccttctatgtgccacttattggcctctcagttgtacaccgctttggaaacagccttcatcccattgtgcgtgttgtcatgggtgacatctacctgctgctgcctcctgtcatcaatcccatcatctatggtgccaaaaccaaacagatcagaacacgggtgctggctatgttcaagatcagctgtgacaaggacttgcaggctgtgggaggcaagtga

SEQ ID NO: 337 - protein, 320 aa, Homo sapiens
MSSCNFTHATFVLIGIPGLEKAHFWVGFPLLSMYVVAMFGNCIVVFIVRTERSLHAPMYLFLCMLAAIDLALSTSTMPKILALFWFDSREISFEACLTQMFFIHALSAIESTILLAMAFDRYVAICHPLRHAAVLNNTVTAQIGIVAVVRGSLFFFPLPLLIKRLAFCHSNVLSHSYCVHQDVMKLAYADTLPNVVYGLTAILLVMGVDVMFISLSYFLIIRTVLQLPSKSERAKAFGTCVSHIGVVLAFYVPLIGLSVVHRFGNSLHPIVRVVMGDIYLLLPPVINPIIYGAKTKQIRTRVLAMFKISCDKDLQAVGGK

SEQ ID NO: 338 - DNA, 838 bp, Homo sapiens
gcacgatgagctcaatcggcactgggtatgacctgtcagcctctacattctctcctgacggaagagtttttcaagttgaatatgctatgaaggctgtggaaaatagtagtacagctattggaatcagatgcaaagatggtgttgtctttggggtagaaaaattagtcctttctaaactttatgaagaaggttccaacaaaagactttttaatgttgatcggcatgttggaatggcagtagcaggtttgttggcagatgctcgttctttagcagacatagcaagagaagaagcttccaacttcagatctaactttggctacaacattccactaaaacatcttgcagacagagtggccatgtatgtgcatgcatatacactctacagtgctgttagaccttttggctgcagtttcatgttagggtcttacagtgtgaatgacggtgcgcaactctacatgattgacccatcaggtgtttcatacggttattggggctgtgccatcggcaaagccaggcaagctgcaaagacggaaatagagaagcttcagatgaaagaaatgacctgccgtgatatcgttaaagaagttgcaaaaataatttacatagtacatgacgaagttaaggataaagcttttgaactagaactcagctgggttggtgaattaactaatggaagacatgaaattgttccaaaagatataagagaagaagcagagaaatatgctaaggaatctctgaaggaagaagatgaatcagatgatgataatatgtaacatttactccagcatctattgtattttaaatttctactccagtccaatgtaactatttagccctg

SEQ ID NO: 339 - protein, 255 aa, Homo sapiens
MSSIGTGYDLSASTFSPDGRVFQVEYAMKAVENSSTAIGIRCKDGVVFGVEKLVLSKLYEEGSNKRLFNVDRHVGMAVAGLLADARSLADIAREEASNFRSNFGYNIPLKHLADRVAMYVHAYTLYSAVRPFGCSFMLGSYSVNDGAQLYMIDPSGVSYGYWGCAIGKARQAAKTEIEKLQMKEMTCRDIVKEVAKIIYIVHDEVKDKAFELELSWVGELTNGRHEIVPKDIREEAEKYAKESLKEEDESDDDNM

SEQ ID NO: 340 - DNA, 3000 bp, Homo sapiens
ccgccggccggggcgcctggctgcactcagcgccggagccgggagctagcggccgccgccatgtcccaccagaccggcatccaagcaagtgaagatgttaaagagatctttgccagagccagaaatggaaagtacagacttctgaaaatatctattgaaaatgagcaacttgtgattggatcatatagtcagccttcagattcctgggataaggattatgattcctttgttttacccctgttggaggacaaacaaccatgctatatattattcaggttagattctcagaatgcccagggatatgaatggatattcattgcatggtctccagatcattctcatgttcgtcaaaaaatgttgtatgcagcaacaagagcaactctgaagaaggaatttggaggtggccacattaaagatgaagtatttggaacagtaaaggaagatgtatcattacatggatataaaaaatacttgctgtcacaatcttcccctgccccactgactgcagctgaggaagaactacgacagattaaaatcaatgaggtacagactgacgtgggtgtggacactaagcatcaaacactacaaggagtagcatttcccatttctcgagaagcctttcaggctttggaaaaattgaataatagacagctcaactatgtgcagttggaaatagatataaaaaatgaaattataattttggccaacacaacaaatacagaactgaaagatttgccaaagaggattcccaaggattcagctcgttaccatttctttctgtataaacattcccatgaaggagactatttagagtccatagtttttatttattcaatgcctggatacacatgcagtataagagagcggatgctgtattctagctgcaagagccgtctgctagaaattgtagaaagacaactacaaatggatgtaattagaaagatcgagatagacaatggggatgagttgactgcagacttcctttatgaagaagtacatcccaagcagcatgcacacaagcaaagttttgcaaaaccaaaaggtcctgcaggaaaaagaggaattcgaagactaattaggggcccagcggaaactgaagctactactgattaaagtcatcacattaaacattgtaatactagttttttaaaagtccagcttttagtacaggagaactgaaatcattccatgttgatataaagtagggaaaaaaattgtactttttggaaaatagcacttttcacttctgtgtgtttttaaaattaatgttatagaagactcatgatttctatttttgagttaaagctagaaaagggttcaacataatgtttaattttgtcacactgttttcatagcgttgattccacacttcaaatacttcttaaaattttatacagttgggccagttctagaaagtctgatgtctcaaagggtaaacttactactttcttgtgggacagaaagaccttaaaatattcatattacttaatgaatatgttaaggaccaggctagagtattttctaagctggaaacttagtgtgccttggaaaagccgcaagttgcttactccgagtagctgtgctagctctgtcagactgtaggatcatgtctgcaacttttagaaatagtgctttatattgcagcagtcttttatatttgacttttttttaatagcattaaaattgcagatcagctcactctgaaactttaagggtaccagatattttctatactgcaggatttctgatgacattgaaagactttaaacagccttagtaaattatctttctaatgctctgtgaggccaaacatttatgttcagattgaaatttaaattaatatcattcaaaaggaaacaaaaaatgttgagttttaaaaatcaggattgacttttttctccaaaaccatacatttatgggcaaattgtgttctttatcacttccgagcaaatactcagatttaaaattactttaaagtcctggtacttaacaggctaacgtagataaacaccttaataatctcagttaatactgtatttcaaaacacatttaactgttttctaatgctttgcattatcagttacaacctagagagattttgagcctcatatttctttgatacttgaaatagagggagctagaacacttaatgtttaatctgttaaacctgctgcaagagccataactttgaggcattttctaaatgaactgtggggatccaggatttgtaatttcttgatctaaactttatgctgcataaatcacttatcggaaatgcacatttcatagtgtgaagcactcatttctaaaccttattatctaaggtaatatatgcacctttcagaaatttgtgttcgagtaagtaaagcatattagaataattgtgggttgacagatttttaaaatagaatttagagtatttggggttttgtttgtttacaaataatcagactataatatttaaacatgcaaaataactgacaataatgttgcacttgtttactaaagatataagttgttccatgggtgtacacgtagacagacacacatacacccaaattattgcattaagaatcctggagcagaccatagctgaagctgttattttcagtcaggaagactacctgtcatgaaggtataaaataatttagaagtgaatgtttttctgtaccatctatgtgcaattatactctaaattccactacactacattaaagtaaatggacattccagaatatagatgtgattatagtcttaaactaattattattaaaccaatgattgctgaaaatcagtgatgcatttgttatagagtataactcatcgtttacagtatgttttagttggcagtatcatacctagatggtgaataacatattcccagtaaatttatatagcagtgaagaattacatgccttctggtggacattttataagtgcattttatatcacaataaaaattttttctctttaaaaaaaaaaaacaagaaaaaaaaaaaa

SEQ ID NO: 341 - protein, 350 aa, Homo sapiens
MSHQTGIQASEDVKEIFARARNGKYRLLKISIENEQLVIGSYSQPSDSWDKDYDSFVLPLLEDKQPCYILFRLDSQNAQGYEWIFIAWSPDHSHVRQKMLYAATRATLKKEFGGGHIKDEVFGTVKEDVSLHGYKKYLLSQSSPAPLTAAEEELRQIKINEVQTDVGVDTKHQTLQGVAFPISREAFQALEKLNNRQLNYVQLEIDIKNEIIILANTTNTELKDLPKRIPKDSARYHFFLYKHSHEGDYLESIVFIYSMPGYTCSIRERMLYSSCKSRLLEIVERQLQMDVIRKIEIDNGDELTADFLYEEVHPKQHAHKQSFAKPKGPAGKRGIRRLIRGPAETEATTD

SEQ ID NO: 342 - DNA, 12680 bp, Homo sapiens
cctcccgcctcagttcgcgccgcgcctcggcttggaacgcaggagcgccggctccgggagcccgagcggagccagccgcgcgcacagccagcggccgcgccggcgatgcggggccaccccgcgcccgccccagtcccggccccggcccccgcgggaaggggctgagctgcccgccgccgcccggatggcgagcctcgccgcgctcgccctcagcctgctcctgaggctgcagctgccgccactgcccggcgcccgggctcagagcgccccaggtggctgttcctttgatgagcactacagcaactgtggttatagtgtggctctagggaccaatgggttcacctgggagcagattaacacaacggagaaaccaatgctggaccaggcagtgcccacaggatctttcatgatggtgaacagctctgggagagcctctggccagaaggcccaccttctcctgccaaccctgaaggagaatgacacccactgcatcgacttccattactacttctccagccgtgacaggtccagcccaggggccttgaacgtctacgtgaaggtgaatggtggcccccaagggaaccctgtgtggaatgtgtccggggtcgtcactgagggctgggtgaaggcagagctcgccatcagcactttctggccacatttctatcaggtgatatttgaatccgtctcattgaagggtcatcctggctacatcgccgtggacgaggtccgggtccttgctcatccatgcagaaaagcacctcattttctgcgactccaaaacgtggaggtgaatgtggggcagaatgccacatttcagtgcattgctggtgggaagtggtctcagcatgacaagctttggctccagcaatggaatggcagggacacggccctgatggtcacccgtgtggtcaaccacaggcgcttctcagccacagtcagtgtggcagacactgcccagcggagcgtcagcaagtaccgctgtgtgatccgctctgatggtgggtctggtgtgtccaactacgcggagctgatcgtgaaagagcctcccacgcccattgctcccccagagctgctggctgtgggggccacatacctgtggatcaagccaaatgccaactccatcatcggggatggccccatcatcctgaaggaagtggaatatcgcaccaccacaggcacgtgggcagagacccacatagtcgactctcccaactataagctgtggcatctggaccccgatgttgagtatgagatccgagtgctcctcacacgaccaggtgaggggggtacgggaccgccaggggctcccctcaccaccaggaccaagtgtgcagatccggtacatggcccacagaacgtggaaatcgtagacatcagagcccggcagctgaccctgcagtgggagcccttcggctacgcggtgacccgctgccatagctacaacctcaccgtgcagtaccagtatgtgttcaaccagcagcagtacgaggccgaggaggtcatccagacctcctcccactacaccctgcgaggcctgcgccccttcatgaccatccggctgcgactcttgctgtctaaccccgagggccgaatggagagcgaggagctggtggtgcagactgaggaagacgttccaggagctgttcctctagaatccatccaaggggggccctttgaggagaagatctacatccagtggaaacctcccaatgagaccaatggggtcatcacgctctacgagatcaactacaaggctgtcggctcgctggacccaagtgctgacctctcgagccagagggggaaagtgttcaagctccggaatgaaacccaccacctctttgtgggtctgtacccagggaccacctattccttcaccatcaaggccagcacagcaaagggctttgggccccctgtcaccactcggattgccaccaaaatttcagctccatccatgcctgagtacgacacagacaccccattgaatgagacagacacgaccatcacagtgatgctgaaacccgctcagtcccggggagctcctgtcagtgtttatcagctggttgtcaaggaggagcgacttcagaagtcacggagggcagctgacattattgagtgcttttcggtgcccgtgagctatcggaatgcctccagcctcgattctctacactactttgctgctgagttgaagcctgccaacctgcctgtcacccagccatttacagtgggtgacaataagacatacaatggctactggaaccctcctctctctcccctgaaaagctacagcatctacttccaggcactcagcaaagccaatggagagaccaaaatcaactgtgttcgtctggctacaaaagcaccaatgggcagcgcccaggtgaccccggggactccactctgcctcctcaccacaggtgcctccacccagaattctaacactgtggagccagagaagcaggtggacaacaccgtgaagatggctggcgtgatcgctggcctcctcatgttcatcatcattctcctgggcgtgatgctcaccatcaaaaggagaagaaatgcttattcctactcctattacttgtcccaaaggaagctggccaagaagcagaaggagacccagagtggagcccagagggagatggggcctgtggcctctgccgacaaacccaccaccaagctcagcgccagccgcaatgatgaaggcttctcttctagttctcaggacgtcaacggattcacagatggcagccgcggggagctttcccagcccaccctcacgatccagactcatccctaccgcacctgtgaccctgtggagatgagctacccccgggaccagttccaactcgccatccgggtggctgacttgctgcagcacatcacgcagatgaagagaggccagggctacgggttcaaggaggaatacgaggccttaccagaggggcagacagcttcgtgggacacagccaaggaggatgaaaaccgcaataagaatcgatatgggaacatcatatcctacgaccattcccgggtgaggctgctggtgctggatggagacccgcactctgactacatcaatgccaactacattgacggataccatcgacctcggcactacattgcgactcaaggtccgatgcaggagactgtaaaggacttttggagaatgatctggcaggagaactccgccagcatcgtcatggtcacaaacctggtggaagtgggcagggtgaaatgtgtgcgatactggccagatgacacggaggtctacggagacattaaagtcaccctgattgaaacagagcccctggcagaatacgtcatacgcaccttcacagtccagaagaaaggctaccatgagatccgggagctccgcctcttccacttcaccagctggcctgaccacggcgttccctgctatgccactggccttctgggcttcgtccgccaggtcaagttcctcaaccccccggaagctgggcccatagtggtccactgcagtgctggggctgggcggactggctgcttcattgccattgacaccatgcttgacatggccgagaatgaaggggtggtggacatcttcaactgcgtgcgtgagctccgggcccaaagggtcaacctggtacagacagaggagcaatatgtgtttgtgcacgatgccatcctggaagcgtgcctctgtggcaacactgccatccctgtgtgtgagttccgttctctctactacaatatcagcaggctggacccccagacaaactccagccaaatcaaagatgaatttcagaccctcaacattgtgacaccccgtgtgcggcccgaggactgcagcattgggctcctgccccggaaccatgataagaatcgaagtatggacgtgctgcctctggaccgctgcctgcccttccttatctcagtggacggagaatccagcaattacatcaacgcagcactgatggatagccacaagcagcctgccgccttcgtggtcacccagcaccctctacccaacaccgtggcagacttctggaggctggtgttcgattacaactgctcctctgtggtgatgctgaatgagatggacactgcccagttctgtatgcagtactggcctgagaagacctccgggtgctatgggcccatccaggtggagttcgtctccgcagacatcgacgaggacatcatccacagaatattccgcatctgtaacatggcccggccacaggatggttatcgtatagtccagcacctccagtacattggctggcctgcctaccgggacacgcccccctccaagcgctctctgctcaaagtggtccgacgactggagaagtggcaggagcagtatgacgggagggagggacgtactgtggtccactgcctaaatgggggaggccgtagtggaaccttctgtgccatctgcagtgtgtgtgagatgatccagcagcaaaacatcattgacgtgttccacatcgtgaaaacactgcgtaacaacaaatccaacatggtggagaccctggaacagtataaatttgtatacgaggtggcactggaatatttaagctccttttagctcaatgggatggggaactgccggagtccagaggctgctgtgaccaagcccccttttgtgtgaatggcagtaactgggctcaggagctctgaggtggcaccctgcctgactccaaggagaagactggtggccctgtgttccacggggggctctgcaccttctgaggggtctcctgttgccgtgggagatgctgctccaaaaggcccaggcttccttttcaacctaaccagccacagccaagggcccaagcagaagtacacccacaagcaaggccttggatttctggctcccagaccacctgcttttgttctgagtttgtggatctcttggcaagccaactgtgcaggtgctggggagtgggaggctcccctgccctccttctccttaggagtggaggagatgtgtgttctgctcctctacgtcatggaaaagattgaggctcttgggggtcactgctctgctgccccctgcaacctccttcaggggcctctggcaccagacatttgcagtctggaccagtgtgaccttacgatgttccctaggccacaagagaggccccccatcctcacacctaacctgcatggggcttcgcccacaaccattctgtaccccttccccagcctgggccttgaccgtccagcattcactggccggccagctgtgtccacagcagtttttgataaaggtgttctttgcttttttgtgtggtcagtgggagggggtggaactgcagggaacttctctgctcctccttgtctttgtaaaaagggaccacctccctggggcagggcttgggctgacctgtaggatgtaacccctgtgtttctttggtggtagctttctttggaagagacaaacaagataagatttgattattttccaaagtgtatgtgaaaagaaactttcttttggagggtgtaaaatcttagtctcttatgtcaaaaagaagggggcgggggagtttgagtatgtacctctaagacaaatctctcgggccttttattttttcctggcaatgtccttaaaagctcccaccctgggacagcatgccactgagcaaggagagatgggtgagcctgaagatggtccctttggtttctggggcaaatagagcaccagctttgtgcataatttggatgtccaaatttgaactccttcctaaagaaacccagcagccaccttgaaaaaggccattgtggagcccattatactttgatttaaaataggccaagagaatcaggcctggagatctagggtcttgtccaaagtgtgagtgagtcaatgagagggaaccaacatttgctaagtctctactgtatgccagggatcatgcttggcactttccataggacatttcacacagtccttagaacccccaggagagagctactgacttgttatcatctccatttgatcatctcctccaatgaggaaacccacgcaccttccttagtaatgaaatcctgggttccaaaggggcaggtaatggcaatgagacttctccgtgctgttttcttcatcttctctaagccaagcaattattttatggagggaaaataaggccagaaacttctgagcagataactccacaaatggaaatttagtactttcttcctgatgccagttcttctgggaagcgcagaatttcagatatattttagtaacacattcccagctccccaggaaagccagtctcatctaatttcttagtcagtaaaaacaattccctgttccttcaggctatgaatggaccagccagggaaactctcgaccttgatctctagccagtgcttaggcccaatatctgacagcctcaggtgggctgggacctaggaagctccatcttgaaggctggtctagccccagacagggcatgaggggcagagaattcaagaaggtacagctttggccctcaagagcccactgtatgctggggaaatggaaccatggtgcagtagtgtggagtggatgagtgttccatgagcctaggagcaagaaagtctcttcggcctcgggcttcctggagaaggggacgtccattcctgctgggtcttaacaagcataaaaaggaaaaaaaggaaactcaggcaaagggatccatatgtgcaatggcaaagaaatgtgaaaaggcattgggagaagcagtctgggggaggccagcccagtgcgggcacagcacaacacggggagcagcaagagatgagccagggtccaggagacagatgcccatcgcgagtacagactttgtcctattggcaacaaggagtccatggagctttagagagatgcactcagcttcgtgttggccaagactccttctgggccaatggggctgcctcttttcctttcatcagacactgtgaaaacattcccttaagcgtgcactttttaatatcacatctatttgtctgtctgctcattgttttgttgctggaactaaatatgcaatggatcatgagactcagattctatgagaaacccagggtctctgctttaccacggagcagggtcaccaacccagatctccaggcccatgaggatggaacatgaaaggagccgacaaaagttgcttccattggcatgggctctggagctgtccagaagtccagggacaccagacttgatcaaggaagggctgtcactttagaggttcaaaaggaagtgcctcaaagcaaaggcaagcaaaggaaccccacgatgaacttgctcttttcctttgatgagcctctccccaggtgtatttcagcagaccccggggacccacccccactgggcctgctggcctccctcggctccagcccaatgccccagctggccttccccagcctgcaaggagcctgtagcatggcaaatctgcctgctgtatgctattttcttagatcttggtacatccagacaggatgagggtggagggagagctatttaacacaaatcctaagatttttttctgctcaggaaggggtgaaatagctggcagatacaaaagacagtggcttttatcattttaaatggtaggaatttaaggtgtgacttcagggagaaacaaacttgcaaaaaaaaaaaatctcaggccatgttggggtaacccagcaagggccagtgatgatttcccccagctcatccccttattttcccacaacccaaccattctctaaagcaggacagtgaataggtcttaggccagtgcacacaggaagaaattgaggcttatggatggggatgacttccctaagatcccatgggacaaggatgtggcaaggcttggatgagatggggcaccagtgcccaggaatttgaacattttcctttacccaggaaatctccggagccaacaccaccacccccagggggtctccccaccccaccccatttacagggtgagctcagcctgtcatgagcagaggaaaatattattaatgctctctgagtctttacaacaggagctcttacctcatagatgtgggctctgtttggggaagatgcaaggaagtaatgagaagcccaggaaatttctccacctgtgtttatggcctaaatagcttcaggatgtatcttagctgcactccaacattgcatcctttctggggtgaagaatctgggccaaccaggggtccttgggcctctagaaggccacagtaggcctctctttgtgggaatggaaggggacagtttgcttttagtgctggccctctctgtgggtgtggcctgcaaaggaaccaacagaccctatgctggggactctaacatgtgagctcattaaattcttccagcattctaaaggagggtttgtgattgtcaccatttactgatgaggaaactaaggctcctaggggagaaatcacttgcccacagttccacagctagtgagtgaatgaaccaggatttaaaccggttttttctcactacagagacaatatttttccaccattgtatctcacatttttcccaggaggttacccataacagaagagactagagtggaacagatacgtcagtggataaagctcaaagcaaacaacagtaagcttaaaattccttcatagtctcatgttttacgttcacaattcatgcaaaatttgcattccactttctgatttagccttgttggttttaatatgactctatgaatatttcaaaaaaaaatgtgctctgttcctcatgttgttctgttctgttcaccccgctatgacggaccctaggtcagctggtcttcagcttgaccctagaattgactctaggagcagtgaccctgctgcctcccagagccagttataggctcaagatcaagaccaactgaccttctcctaggcagctcctttggtgtgtgggtgctctgacctcactgttcatgaggggacctcaactaaggcatcttccagttgggtgctggaaggaacccattaactcacactagaatgatgaggatttgctcatctggcgtggagaaggatgagcccacaaaaccctaaagggaaaagagaagctggacacagctgtactcagcagattcctgaatgctaggctggaaagtggtgcctgttgtccaagtggagtcacatggttgctaatgtgggcaagtctgaggacacacttcatgagcagctggggtctggaaggctcctcactttaccctagccacacataattactgggtgcctacagcacctagcaccttggagggggcactattaggaaatcgagattactatggcacaattaattcctgggtaaggcatggggttgtggtggacagagctcagtctttagtttgaacgaaaacatacatacatgaaaaacatacatgaaaaaaggaccctcatcaacattagaaggggtagatttggagcactttaggcaggaaaacaggaacgcaaggccaggaaactggaacccagtgaatactcagaaccgaggatgcagatgacttatttagcaaaatggtcacttctgtgacatagctggagaaaggatgggtaacagcttgccagagccacttggaacaagggcaaatctcagtgtctggggcaaaagatgatgcatttccctctgacccatcatgtttattcatcctccactccccattgccacactagctcttgctgtaagtcctcaccaggatctacatttcctcgtcgctggtgggaaccccttagagtacatagaggtatcagtccagtaagactgctctacacaacagaagtgaggcccagggagtagcagccaggcccttatcctgttacctctgcaggagtgactgcccaacccagatccagagacattgaaggaaatgataattccttggtacctcactgccttgggacaaaatgaagaaagccacccttccttaggctgcagcttgccactcctgggctgggtaaacaggtcatcagcaccaggctcaaccaggagtaacattctggaagacatgggtgagcccaagaggaagcatgaacaggacgctgttcctaagtcatgtcaacaggttgtgctgggccaggatccccagggaaaaaaatggtcaacccaactggagggtaggttagaagaaaaaaaacataaacgtggatagtcatgtcatctcaaatccctgacttggcttccccattacttgacagtctgagctccttcttagcctgtgaccagcttcaaatcacagccaagtaaaacaaggaaataggaaaagtaaatccaactagaagagacaagctgagattcagatttgtttactcctcccatgcaaagtttccctgttggaggttttccatgtatacatgtctagaagtgatagaatgcaaggccttggctttgtcttgcagggatctgcctttgaggtcatagactgaacagcagggagagaggttagtggtggagtgtggggggagctgttctagctccagtttcttctgacacatttttcaggatcatggatctgatcctccgaagcacagcagagatatctaagccatatttgtgcacatgagcagactcttctagttttttagtaaccagggatgggcttttgcatggcactgactatagagatgtcttgtagagatcaagccagtcttttgcatcccacctgcccacctccagaagagatgggaaaaggtcatcaaagggcattcaccaactgaaatccactcatgaatgttaggtctctaaaaggaggcatcaacactcacaatggtagcctccaaacctagcatcccacctatctaagagctcaggggtggtccactggggcagatacaagggaagtgcaagggctcaggatgaaagaaaatctattgggaagagttttaggggcttgatcattatggggcttccttctatatctgagaactgctctgggtggtgagatgtggactctgatccttaattggaatgttcggagaatgagtgtctggtggccttgaagtgttggacagaaaagtatcagtataaaagcctggagctcagggtaattaatgtagttcatggttccttagtgagcaggactcttggatgtggaggagaaagggtcataggaagtaaaccaccaaaattacaaaattgagtctctgtacaattacttcagtgcctttgggcttatgaatacaaatcagtgggccttctctatgatggtccaacaaactctcagtgtccaccctgtccctgtatctcccatggaagatgaataatgtcaggtgttctttgggtcaaaggccccagggcagtctggaggcttagagggcagagtggtgtcattccatgtaaagttaggcttctgaggggtcaggcagaatatggtgtccatatcttccatagctctgcagattcttggatgaagtcaagcacagtttgctagacccaggtcactcctctgagtataactaggacccatgagtgaaacttaatagctgtaaggaagaacctgctgtctgccagagaggataagctgcccatctcagcagctgtctaaaagaaggcaggtgtctctttaaagggaagagaagcattggtgaaatggatttcaggtcacttccattccagatgggtgagatcttgtggagctgggatcatgtttgaactcattcatacctgtagagcacgaatccaagtagattgtgtttggtctgtacaggctgaagccccctgctctcccacccaagtgcccccactgagcaggccaacatgctgttgtggccacatatactgggctgatccaggctggttatcaccaaacagcaaaccatagggaacagctgctttgccatagacccaatacccatgtagatctctcatgagagcagccataactcagacccactgaccaacagggccatgagtgacagccagaaccagtgaaggtccaagtaggacacagagcagggcttttcttaccatacacattatctccagaggttatttctaccccactccctattcaaggcctgttggagcacactgcaaaagcaaaagcacagtaactcaatttacacatgattataatcatttccagtgcacacatttcatcaccaggtggatcctgagctagcccatgtaaatccgggttaacccatattggtaatcatactcaaaagcacttttcaccctacattctactagccaatcaaagacaaagagttgtggcctctaccattgccttggcttctggacaccctcacaagctatcccaaggttcccgctcaactccagggaggctgacatcttcacatccactgggcatataatattgcatgagaccaaagtctccacactctttgcagcctcctccatgaatcccaatggcctgcacttgtacagtttgggtgtttgatagataaagcacgtatgagaagagaaaacaaaataaatcaactttttaaaaaagccagcactgtgctgtcaatgttttttttttcttttcaattctagctcagaaaagcagaaggtaaataatgtcaggtcaatgaatatcagatatattttttgactgtacattacagtgaagtgtaatctttttacacctgcaagtccatcttatttattcttgtaaatgttccctgacaatgtttgtaatatggctgtgttaaaaaatctatacaataaagctgtgaccctg

SEQ ID NO: 343 - protein, 1463 aa, Homo sapiens
MASLAALALSLLLRLQLPPLPGARAQSAPGGCSFDEHYSNCGYSVALGTNGFTWEQINTTEKPMLDQAVPTGSFMMVNSSGRASGQKAHLLLPTLKENDTHCIDFHYYFSSRDRSSPGALNVYVKVNGGPQGNPVWNVSGVVTEGWVKAELAISTFWPHFYQVIFESVSLKGHPGYIAVDEVRVLAHPCRKAPHFLRLQNVEVNVGQNATFQCIAGGKWSQHDKLWLQQWNGRDTALMVTRVVNHRRFSATVSVADTAQRSVSKYRCVIRSDGGSGVSNYAELIVKEPPTPIAPPELLAVGATYLWIKPNANSIIGDGPIILKEVEYRTTTGTWAETHIVDSPNYKLWHLDPDVEYEIRVLLTRPGEGGTGPPGAPLTTRTKCADPVHGPQNVEIVDIRARQLTLQWEPFGYAVTRCHSYNLTVQYQYVFNQQQYEAEEVIQTSSHYTLRGLRPFMTIRLRLLLSNPEGRMESEELVVQTEEDVPGAVPLESIQGGPFEEKIYIQWKPPNETNGVITLYEINYKAVGSLDPSADLSSQRGKVFKLRNETHHLFVGLYPGTTYSFTIKASTAKGFGPPVTTRIATKISAPSMPEYDTDTPLNETDTTITVMLKPAQSRGAPVSVYQLVVKEERLQKSRRAADIIECFSVPVSYRNASSLDSLHYFAAELKPANLPVTQPFTVGDNKTYNGYWNPPLSPLKSYSIYFQALSKANGETKINCVRLATKAPMGSAQVTPGTPLCLLTTGASTQNSNTVEPEKQVDNTVKMAGVIAGLLMFIIILLGVMLTIKRRRNAYSYSYYLSQRKLAKKQKETQSGAQREMGPVASADKPTTKLSASRNDEGFSSSSQDVNGFTDGSRGELSQPTLTIQTHPYRTCDPVEMSYPRDQFQLAIRVADLLQHITQMKRGQGYGFKEEYEALPEGQTASWDTAKEDENRNKNRYGNIISYDHSRVRLLVLDGDPHSDYINANYIDGYHRPRHYIATQGPMQETVKDFWRMIWQENSASIVMVTNLVEVGRVKCVRYWPDDTEVYGDIKVTLIETEPLAEYVIRTFTVQKKGYHEIRELRLFHFTSWPDHGVPCYATGLLGFVRQVKFLNPPEAGPIVVHCSAGAGRTGCFIAIDTMLDMAENEGVVDIFNCVRELRAQRVNLVQTEEQYVFVHDAILEACLCGNTAIPVCEFRSLYYNISRLDPQTNSSQIKDEFQTLNIVTPRVRPEDCSIGLLPRNHDKNRSMDVLPLDRCLPFLISVDGESSNYINAALMDSHKQPAAFVVTQHPLPNTVADFWRLVFDYNCSSVVMLNEMDTAQFCMQYWPEKTSGCYGPIQVEFVSADIDEDIIHRIFRICNMARPQDGYRIVQHLQYIGWPAYRDTPPSKRSLLKVVRRLEKWQEQYDGREGRTVVHCLNGGGRSGTFCAICSVCEMIQQQNIIDVFHIVKTLRNNKSNMVETLEQYKFVYEVALEYLSSF

SEQ ID NO: 344 - DNA, 2987 bp, Homo sapiens
acggaaaagccggggaggggactcggtccggggccggagaccgacggcaacagcggctcaggacccacgctgcccccacccctcccgagcaggcgcccccatggcccgaccccgctgattccttcactcggccatgctcccgcggcccctgcggctgcttttggacacgagcccccccgggggagtcgtactgagcagcttccgaagccgggaccccgaagagggtgggggcccaggtggcctggtcgtgggcggggggcaggaggaagaggaggaggaagaagaagaggcccctgtgtccgtctgggatgaggaggaggatggtgccgtgtttaccgtcacaagccgccaatatcgacctcttgatcccttggtccctatgcctcccccacgttcctcccgacggctccgagctggcactctggaggccctggtcagacacctactggatacccggacatcagggactgatgtgagcttcatgtcagccttcctggctacccaccgggccttcacctccacgcctgccttgctagggcttatggctgacaggctggaagcccttgaatctcatcctaccgacgaactagagaggacaacagaggtagccatctctgtactgtcaacctggctggcctctcaccctgaggattttggctctgaggccaagggtcagcttgaccggcttgagagcttcttacttcagacagggtatgcagcagggaagggtgttggggggggcagcgctgacctcatccgcaatctccggtcccgggtggacccccaggcccccgaccttcctaagcccctggccctccccggcgatccccctgctgaccccacggatgtcctggtgttcctcgctgaccacttggccgaacagctgaccctgctagatgcggaactttttctcaatttgatcccctctcagtgcctgggaggcctgtggggtcacagagaccggccaggacattctcacctctgcccatctgtccgagctactgtcacacagtttaacaaggtggcaggggcagtggttagttctgtcctgggggctacttccactggagagggacctggggaggtgaccatacggccactccgtcccccacagagggcccggctcctggagaagtggatccgcgtggcagaggagtgccggctgctccgaaacttctcttcagtttatgccgtggtgtcagccctgcagtccagccccatccacaggcttcgggcagcctggggggaagcaaccagggacagcctcagagtcttttccagcctctgccagattttctccgaggaggataattattcccagagtcgggagctgctcgtgcaggaggtgaagctgcagtctcctctggagccacactccaagaaggccccgaggtctggctcccggggtgggggtgtggtcccataccttggcaccttcctgaaggaccttgtgatgctggatgcagcctccaaggatgagttggagaatggatacatcaattttgacaagcggaggaaggagtttgcagtcctttctgagttgcgacggctccagaatgaatgtcgtggctataacctccaacctgaccatgatatccagaggtggctacaggggctccggccactgacagaggctcagagccatcgtgtatcctgtgaggtggagccacctggttccagtgaccctcctgccccacgggtgcttcggccaacattggtcatctcgcagtggacagaggttttgggctctgttggggtccctaccccgcttgtgtcctgtgaccggcccagtactgggggagatgaggcgcctacaactcctgctcctctgctgactcggctggcccagcacatgaagtggccatctgtctcgtcactagactctgccttggaaagcagtccatccctgcacagtccagctgaccccagccacctctccccaccagcctcctcccctaggccttctcgaggtcaccgccgctcagcctcctgtggctccccgctgagtgggggtgcagaagaggcctccggggggactggatatgggggagagggatctgggccaggggcctctgattgccgtatcatccgagtccagatggagttgggggaagatggcagtgtctataagagcattttggtgacaagccaggacaaggctccaagtgtcatcagtcgtgtccttaagaaaaacaatcgtgactctgcagtggcttcagagtatgagctggtacagctgctaccaggggagcgagagctgactatcccagcctcggctaatgtattctacgccatggatggagcttcacacgatttcctcctgcggcagcggcgaaggtcctctactgctacacctggcgtcaccagtggcccgtctgcctcaggaactcctccgagtgagggaggagggggctcctttcccaggatcaaggccacagggaggaagattgcacgggcactgttctgaggaggaagccccgttggcttacagaagtcatggtgttcataccagatgtgggtagccatcctgaatggtggcaattatatcacattgagacagaaattcagaaagggagccagccaccctggggcagtgaagtgccactggtttaccagacagctgagaaatccagccctgtgggaactggtgtcttataaccaagttggatacctgtgtatagcttcccaccttccatgagtgcagcacacaggtagtgctggaaaaacgcatcagtttctgattcttggccatatcctaacatgcaagggccaagcaaaggcttcaaggctctgagccccagggcagaggggaatggcaaaatgtaggtcctcgcaggagctcttcttcccactctgggggtttctatcactgtgacaacactaagataataaaccaaaacactacctgaaaaaaaaaaaaaaaaaaaaaaaaaaaaaaaaaaaaaaaaaaaaaaaaaaaaaaaaaaaaaaaaaaaaaaaaaaaaaaa

SEQ ID NO: 345 - protein, 777 aa, Homo sapiens
MLPRPLRLLLDTSPPGGVVLSSFRSRDPEEGGGPGGLVVGGGQEEEEEEEEEAPVSVWDEEEDGAVFTVTSRQYRPLDPLVPMPPPRSSRRLRAGTLEALVRHLLDTRTSGTDVSFMSAFLATHRAFTSTPALLGLMADRLEALESHPTDELERTTEVAISVLSTWLASHPEDFGSEAKGQLDRLESFLLQTGYAAGKGVGGGSADLIRNLRSRVDPQAPDLPKPLALPGDPPADPTDVLVFLADHLAEQLTLLDAELFLNLIPSQCLGGLWGHRDRPGHSHLCPSVRATVTQFNKVAGAVVSSVLGATSTGEGPGEVTIRPLRPPQRARLLEKWIRVAEECRLLRNFSSVYAVVSALQSSPIHRLRAAWGEATRDSLRVFSSLCQIFSEEDNYSQSRELLVQEVKLQSPLEPHSKKAPRSGSRGGGVVPYLGTFLKDLVMLDAASKDELENGYINFDKRRKEFAVLSELRRLQNECRGYNLQPDHDIQRWLQGLRPLTEAQSHRVSCEVEPPGSSDPPAPRVLRPTLVISQWTEVLGSVGVPTPLVSCDRPSTGGDEAPTTPAPLLTRLAQHMKWPSVSSLDSALESSPSLHSPADPSHLSPPASSPRPSRGHRRSASCGSPLSGGAEEASGGTGYGGEGSGPGASDCRIIRVQMELGEDGSVYKSILVTSQDKAPSVISRVLKKNNRDSAVASEYELVQLLPGERELTIPASANVFYAMDGASHDFLLRQRRRSSTATPGVTSGPSASGTPPSEGGGGSFPRIKATGRKIARALF

SEQ ID NO: 346 - DNA, 1200 bp, Homo sapiens
aagatataaaagctccagaaacgttgactgggaccactggagacactgaagaaggcaggggcccttagagtcttggttgccaaacagatttgcagatcaaggagaacccaggagtttcaaagaagcgctagtaaggtctctgagatccttgcactagctacatcctcagggtaggaggaagatggcttccagaagcatgcggctgctcctattgctgagctgcctggccaaaacaggagtcctgggtgatatcatcatgagacccagctgtgctcctggatggttttaccacaagtccaattgctatggttacttcaggaagctgaggaactggtctgatgccgagctcgagtgtcagtcttacggaaacggagcccacctggcatctatcctgagtttaaaggaagccagcaccatagcagagtacataagtggctatcagagaagccagccgatatggattggcctgcacgacccacagaagaggcagcagtggcagtggattgatggggccatgtatctgtacagatcctggtctggcaagtccatgggtgggaacaagcactgtgctgagatgagctccaataacaactttttaacttggagcagcaacgaatgcaacaagcgccaacacttcctgtgcaagtaccgaccatagagcaagaatcaagattctgctaactcctgcacagccccgtcctcttcctttctgctagcctggctaaatctgctcattatttcagaggggaaacctagcaaactaagagtgataagggccctactacactggcttttttaggcttagagacagaaactttagcattggcccagtagtggcttctagctctaaatgtttgccccgccatccctttccacagtatccttcttccctcctcccctgtctctggctgtctcgagcagtctagaagagtgcatctccagcctatgaaacagctgggtctttggccataagaagtaaagatttgaagacagaaggaagaaactcaggagtaagcttctagaccccttcagcttctacacccttctgccctctctccattgcctgcaccccaccccagccactcaactcctgcttgtttttcctttggccataggaaggtttaccagtagaatccttgctaggttgatgtgggccatacattcctttaataaaccattgtgtacataagaaaaaaaaaa

SEQ ID NO: 347 - protein, 158 aa, Homo sapiens
MASRSMRLLLLLSCLAKTGVLGDIIMRPSCAPGWFYHKSNCYGYFRKLRNWSDAELECQSYGNGAHLASILSLKEASTIAEYISGYQRSQPIWIGLHDPQKRQQWQWIDGAMYLYRSWSGKSMGGNKHCAEMSSNNNFLTWSSNECNKRQHFLCKYRP

SEQ ID NO: 348 - DNA, 558 bp, Homo sapiens
atgcctcgcctgttcttgttccacctgctagaattctgtttactactgaaccaattttccagagcagtcgcggccaaatggaaggacgatgttattaaattatgcggccgcgaattagttcgcgcgcagattgccatttgcggcatgagcacctggagcaaaaggtctctgagccaggaagatgctcctcagacacctagaccagtggcagaaattgtaccatccttcatcaacaaagatacagaaactataattatcatgttggaattcattgctaatttgccaccggagctgaaggcagccctatctgagaggcaaccatcattaccagagctacagcagtatgtacctgcattaaaggattccaatcttagctttgaagaatttaagaaacttattcgcaataggcaaagtgaagccgcagacagcaatccttcagaattaaaatacttaggcttggatactcattctcaaaaaaagagacgaccctacgtggcactgtttgagaaatgttgcctaattggttgtaccaaaaggtctcttgctaaatattgctga

SEQ ID NO: 349 - protein, 185 aa, Homo sapiens
MPRLFLFHLLEFCLLLNQFSRAVAAKWKDDVIKLCGRELVRAQIAICGMSTWSKRSLSQEDAPQTPRPVAEIVPSFINKDTETIIIMLEFIANLPPELKAALSERQPSLPELQQYVPALKDSNLSFEEFKKLIRNRQSEAADSNPSELKYLGLDTHSQKKRRPYVALFEKCCLIGCTKRSLAKYC

SEQ ID NO: 350 - DNA, 1506 bp, Homo sapiens
tcgacgcaggaggaaaccgactgctgcctggtctgcaaagaagtcctttcaagtctctaggactggactcttcctaagcaagtccgagaaggaagcaccctcactatgtggctctacctggcggccttcgtgggcctgtactaccttctgcactggtaccgggagaggcaggtggtgagccacctccaagacaagtatgtctttatcacgggctgtgactcgggctttgggaacctgctggccagacagctggatgcacgaggcttgagagtgctggctgcgtgtctgacggataagggggccgagcagctgaggggccagacgtctgacaggctggagacggtgaccctggatgttaccaagatggagagcatcgctgcagctactcagtgggtgaaggagcatgtgggggacagaagactctggggactggtgaacaatgcaggcattcttacaccaattaccttatgtgagtggctgaacactgaggactctatgaatatgctcaaagtgaacctcattggtgtgatccaggtgaccttgagcatgcttcctttggtgaggagagcacgggggaagaattgtcaatgtctccagcattctgggaagagttgctttctttgtagaggctactgtgtctccaagtatggagtggaagccttttcagatattctgaggcgtgagattcaacattttggggtgaaaatcagcatagttgaacctggctacttcagaacgggaatgacaaacatgacacagtccttagagcgaatgaagcaaagttggaaagaagcccccaagcatattaaggagacctatggacagcagtattttgatgccctttacaatatcatgaaggaagggctgttgaattgtagcacaaacctgaacctggtcactgactgcatggaacatgctctgacatcggtgcatccgcgaactcgatattcagctggctgggatgctaaatttttcttcatccctctatcttatttacctacatcactggcagactacattttgactagatcttggcccaaaccagcccaggcagtctaaagaaaactgggttggtgcttcttggaatgaaggcaaaaatctgaaattgttagtgtctcagtaatcctgatttagaacccaggctttttgtaacaatgtgttttcttgcctaaattcatttatctggcatcatcagagtactaacatgtttatatttcagatatccaaagcttaccactttaggtgatgaatctttactattttagcccttttttgatgagactatttgtctaaagtgaatcatttgttcttgccttattaaacagagtagatggaaaacaatttaacctattttgaagtcatttctttatgaatatgaataattgttctatgctttaataatctattgtgaggaaactactaagaaatatgttggtgtgtttgtccttacttgaaatgggtctgtattatggtacttttaataaatatttgatttttctttgtcga

SEQ ID NO: 351 - protein, 317 aa, Homo sapiens
MWLYLAAFVGLYYLLHWYRERQVVSHLQDKYVFITGCDSGFGNLLARQLDARGLRVLAACLTDKGAEQLRGQTSDRLETVTLDVTKMESIAAATQWVKEHVGDRRLWGLVNNAGILTPITLCEWLNTEDSMNMLKVNLIGVIQVTLSMLPLVRRARGKNCQCLQHSGKSCFLCRGYCVSKYGVEAFSDILRREIQHFGVKISIVEPGYFRTGMTNMTQSLERMKQSWKEAPKHIKETYGQQYFDALYNIMKEGLLNCSTNLNLVTDCMEHALTSVHPRTRYSAGWDAKFFFIPLSYLPTSLADYILTRSWPKPAQAV

SEQ ID NO: 352 - DNA, 618 bp, Homo sapiens
cttttgcgggtggcggcgaacgcggagagcacgccatgaaggcctcgggcacgctacgagagtacaaggtagtgggtcgctgcctgcccacccccaaatgccacacgccgcccctctaccgcatgcgaatctttgcgcctaatcatgtcgtcgccaagtcccgcttctggtactttgtatctcagttaaagaagatgaagaagtcttcaggggagattgtctactgtgggcaggtgtttgagaagtcccccctgcgggtgaagaacttcgggatctggctgcgctatgactcccggagcggcacccacaacatgtaccgggaataccgggacctgaccaccgcaggcgctgtcacccagtgctaccgagacatgggtgcccggcaccgcgcccgagcccactccattcagatcatgaaggtggaggagatcgcggccagcaagtgccgccggccggctgtcaagcagttccacgactccaagatcaagttcccgctgccccaccgggtcctgcgccgtcagcacaagccacgcttcaccaccaagaggcccaacaccttcttctaggtgcagggccctcgtccgggtgtgccccaaataaactcaggaacgccccggt

SEQ ID NO: 353 - protein, 176 aa, Homo sapiens [sequence omitted]

SEQ ID NO: 354 - DNA, 369 bp, Homo sapiens
atgaagcttctcacgggcctggttttctgctccttggtcctgggtgtcagcagccgaagcttcttttcgttccttggcgaggcttttgatggggctcgggacatgtggagagcctactctgacatgagagaagccaattacatcggctcagacaaatacttccatgctcgggggaactatgatgctgccaaaaggggacctgggggtgtctgggctgcagaagcgatcagcgatgccagagagaatatccagagattctttggccatggtgcggaggactcgctggctgatcaggctgccaatgaatggggcaggagtggcaaagaccccaatcacttccgacctgctggcctgcctgagaaatactga

SEQ ID NO: 355 - protein, 122 aa, Homo sapiens
MKLLTGLVFCSLVLGVSSRSFFSFLGEAFDGARDMWRAYSDMREANYIGSDKYFHARGNYDAAKRGPGGVWAAEAISDARENIQRFFGHGAEDSLADQAANEWGRSGKDPNHFRPAGLPEKY

SEQ ID NO: 356 - DNA, 3834 bp, Homo sapiens
cctgagacagaggcagcagtgatacccacctgagagatcctgtgtttgaacaactgcttcccaaaacggaaagtatttcaagcctaaacctttgggtgaaaagaactcttgaagtcatgattgcttcacagtttctctcagctctcactttggtgcttctcattaaagagagtggagcctggtcttacaacacctccacggaagctatgacttatgatgaggccagtgcttattgtcagcaaaggtacacacacctggttgcaattcaaaacaaagaagagattgagtacctaaactccatattgagctattcaccaagttattactggattggaatcagaaaagtcaacaatgtgtgggtctgggtaggaacccagaaacctctgacagaagaagccaagaactgggctccaggtgaacccaacaataggcaaaaagatgaggactgcgtggagatctacatcaagagagaaaaagatgtgggcatgtggaatgatgagaggtgcagcaagaagaagcttgccctatgctacacagctgcctgtaccaatacatcctgcagtggccacggtgaatgtgtagagaccatcaataattacacttgcaagtgtgaccctggcttcagtggactcaagtgtgagcaaattgtgaactgtacagccctggaatcccctgagcatggaagcctggtttgcagtcacccactgggaaacttcagctacaattcttcctgctctatcagctgtgataggggttacctgccaagcagcatggagaccatgcagtgtatgtcctctggagaatggagtgctcctattccagcctgcaatgtggttgagtgtgatgctgtgacaaatccagccaatgggttcgtggaatgtttccaaaaccctggaagcttcccatggaacacaacctgtacatttgactgtgaagaaggatttgaactaatgggagcccagagccttcagtgtacctcatctgggaattgggacaacgagaagccaacgtgtaaagctgtgacatgcagggccgtccgccagcctcagaatggctctgtgaggtgcagccattcccctgctggagagttcaccttcaaatcatcctgcaacttcacctgtgaggaaggcttcatgttgcagggaccagcccaggttgaatgcaccactcaagggcagtggacacagcaaatcccagtttgtgaagctttccagtgcacagccttgtccaaccccgagcgaggctacatgaattgtcttcctagtgcttctggcagtttccgttatgggtccagctgtgagttctcctgtgagcagggttttgtgttgaagggatccaaaaggctccaatgtggccccacaggggagtgggacaacgagaagcccacatgtgaagctgtgagatgcgatgctgtccaccagcccccgaagggtttggtgaggtgtgctcattcccctattggagaattcacctacaagtcctcttgtgccttcagctgtgaggagggatttgaattatatggatcaactcaacttgagtgcacatctcagggacaatggacagaagaggttccttcctgccaagtggtaaaatgttcaagcctggcagttccgggaaagatcaacatgagctgcagtggggagcccgtgtttggcactgtgtgcaagttcgcctgtcctgaaggatggacgctcaatggctctgcagctcggacatgtggagccacaggacactggtctggcctgctacctacctgtgaagctcccactgagtccaacattcccttggtagctggactttctgctgctggactctccctcctgacattagcaccatttctcctctggcttcggaaatgcttacggaaagcaaagaaatttgttcctgccagcagctgccaaagccttgaatcagacggaagctaccaaaagccttcttacatcctttaagttcaaaagaatcagaaacaggtgcatctggggaactagagggatacactgaagttaacagagacagataactctcctcgggtctctggcccttcttgcctactatgccagatgcctttatggctgaaaccgcaacacccatcaccacttcaatagatcaaagtccagcaggcaaggacggccttcaactgaaaagactcagtgttccctttcctactctcaggatcaagaaagtgttggctaatgaagggaaaggatattttcttccaagcaaaggtgaagagaccaagactctgaaatctcagaattccttttctaactctcccttgctcgctgtaaaatcttggcacagaaacacaatattttgtggctttctttcttttgcccttcacagtgtttcgacagctgattacacagttgctgtcataagaatgaataataattatccagagtttagaggaaaaaaatgactaaaaatattataacttaaaaaaatgacagatgttgaatgcccacaggcaaatgcatggagggttgttaatggtgcaaatcctactgaatgctctgtgcgagggttactatgcacaatttaatcactttcatccctatgggattcagtgcttcttaaagagttcttaaggattgtgatatttttacttgcattgaatatattataatcttccatacttcttcattcaatacaagtgtggtagggacttaaaaaacttgtaaatgctgtcaactatgatatggtaaaagttacttattctagattaccccctcattgtttattaacaaattatgttacatctgttttaaatttatttcaaaaagggaaactattgtcccctagcaaggcatgatgttaaccagaataaagttctgagtgtttttactacagttgttttttgaaaacatggtagaattggagagtaaaaactgaatggaaggtttgtatattgtcagatattttttcagaaatatgtggtttccacgatgaaaaacttccatgaggccaaacgttttgaactaataaaagcataaatgcaaacacacaaaggtataattttatgaatgtctttgttggaaaagaatacagaaagatggatgtgctttgcattcctacaaagatgtttgtcagatgtgatatgtaaacataattcttgtatattatggaagattttaaattcacaatagaaactcaccatgtaaaagagtcatctggtagatttttaacgaatgaagatgtctaatagttattccctatttgttttcttctgtatgttagggtgctctggaagagaggaatgcctgtgtgagcaagcatttatgtttatttataagcagatttaacaattccaaaggaatctccagttttcagttgatcactggcaatgaaaaattctcagtcagtaattgccaaagctgctctagccttgaggagtgtgagaatcaaaactctcctacacttccattaacttagcatgtgttgaaaaaaaaagtttcagagaagttctggctgaacactggcaacgacaaagccaacagtcaaaacagagatgtgataaggatcagaacagcagaggttcttttaaaggggcagaaaaactctgggaaataagagagaacaactactgtgatcaggctatgtatggaatacagtgttattttctttgaaattgtttaagtgttgtaaatatttatgtaaactgcattagaaattagctgtgtgaaataccagtgtggtttgtgtttgagttttattgagaattttaaattataacttaaaatattttataatttttaaagtatatatttatttaagcttatgtcagacctatttgacataacactataaaggttgacaataaatgtgcttatgttt

SEQ ID NO: 357 - protein, 610 aa, Homo sapiens
MIASQFLSALTLVLLIKESGAWSYNTSTEAMTYDEASAYCQQRYTHLVAIQNKEEIEYLNSILSYSPSYYWIGIRKVNNVWVWVGTQKPLTEEAKNWAPGEPNNRQKDEDCVEIYIKREKDVGMWNDERCSKKKLALCYTAACTNTSCSGHGECVETINNYTCKCDPGFSGLKCEQIVNCTALESPEHGSLVCSHPLGNFSYNSSCSISCDRGYLPSSMETMQCMSSGEWSAPIPACNVVECDAVTNPANGFVECFQNPGSFPWNTTCTFDCEEGFELMGAQSLQCTSSGNWDNEKPTCKAVTCRAVRQPQNGSVRCSHSPAGEFTFKSSCNFTCEEGFMLQGPAQVECTTQGQWTQQIPVCEAFQCTALSNPERGYMNCLPSASGSFRYGSSCEFSCEQGFVLKGSKRLQCGPTGEWDNEKPTCEAVRCDAVHQPPKGLVRCAHSPIGEFTYKSSCAFSCEEGFELYGSTQLECTSQGQWTEEVPSCQVVKCSSLAVPGKINMSCSGEPVFGTVCKFACPEGWTLNGSAARTCGATGHWSGLLPTCEAPTESNIPLVAGLSAAGLSLLTLAPFLLWLRKCLRKAKKFVPASSCQSLESDGSYQKPSYIL

SEQ ID NO: 358 - DNA, 5177 bp, Homo sapiens
ggactgcgaaaggagcagggttgcggagctagggctccagcctgcggccgcgcattcttgcgtctggccagccgcgagctctaagggtcggccccgcccggtccgcccccgcggctccctgccaggctctcgcgggcgcgctcggggtggggcctcgcggctggcggagatgcggccggggctgcgcggtggtgatgcgagcctgctgggcggcgcgccggggcagccggagccgcgcgccgcggcgctgtaatcggacaccaagagcgctcgcccccggcctccggccactttccattcactccgaggtgcttgattgagcgacgcggagaagagctccgggtgccgcggcactgcagcgctgagattcctttacaaagaaactcagaggaccgggaagaaagaatttcacctttgcgacgtgctagaaaataaggtcgtctgggaaaaggactggagacacaagcgcatccaaccccggtagcaaactgatgacttttccgtgctgatttctttcaacctcggtattttcccttggatattaacttgcatatctgaagaaatggcattccggacaatttgcgtgttggttggagtatttatttgttctatctgtgtgaaaggatcttcccagccccaagcaagagtttatttaacatttgatgaacttcgagaaaccaagacctctgaatacttcagcctttcccaccatcctttagactacaggattttattaatggatgaagatcaggaccggatatatgtgggaagcaaagatcacattctttccctgaatattaacaatataagtcaagaagctttgagtgttttctggccagcatctacaatcaaagttgaagaatgcaaaatggctggcaaagatcccacacacggctgtgggaactttgtccgtgtaattcagactttcaatcgcacacatttgtatgtctgtgggagtggcgctttcagtcctgtctgtacttacttgaacagagggaggagatcagaggaccaagttttcatgattgactccaagtgtgaatctggaaaaggacgctgctctttcaaccccaacgtgaacacggtgtctgttatgatcaatgaggagcttttctctggaatgtatatagatttcatggggacagatgctgctatttttcgaagtttaaccaagaggaatgcggtcagaactgatcaacataattccaaatggctaagtgaacctatgtttgtagatgcacatgtcatcccagatggtactgatccaaatgatgctaaggtgtacttcttcttcaaagaaaaactgactgacaataacaggagcacgaaacagattcattccatgattgctcgaatatgtcctaatgacactggtggactgcgtagccttgtcaacaagtggaccactttcttaaaggcgaggctggtgtgctcggtaacagatgaagacggcccagaaacacactttgatgaattagaggatgtgtttctgctggaaactgataacccgaggacaacactagtgtatggcatttttacaacatcaagctcagttttcaaaggatcagccgtgtgtgtgtatcatttatctgatatacagactgtgtttaatgggccttttgcccacaaagaagggcccaatcatcagctgatttcctatcagggcagaattccatatcctcgccctggaacttgtccaggaggagcatttacacccaatatgcgaaccaccaaggagttcccagatgatgttgtcacttttattcggaaccatcctctcatgtacaattccatctacccaatccacaaaaggcctttgattgttcgtattggcactgactacaagtacacaaagatagctgtggatcgagtgaacgctgctgatgggagataccatgtcctgtttctcggaacagatcggggtactgtgcaaaaagtggttgttcttcctactaacaactctgtcagtggcgagctcattctggaggagctggaagtctttaagaatcatgctcctataacaacaatgaaaatttcatctaaaaagcaacagttgtatgtgagttccaatgaaggggtttcccaagtatctctgcaccgctgccacatctatggtacagcctgtgctgactgctgcctggcgcgggacccttattgcgcctgggatggccattcctgttccagattctacccaactgggaaacggaggagccgaagacaagatgtgagacatggaaacccactgactcaatgcagaggatttaatctaaaagcatacagaaatgcagctgaaattgtgcagtatggagtaaaaaataacaccacttttctggagtgtgcccccaagtctccgcaggcatctatcaagtggctgttacagaaagacaaagacaggaggaaagaggttaagctgaatgaacgaataatagccacttcacagggactcctgatccgctctgttcagggttctgaccaaggactttatcactgcattgctacagaaaatagtttcaagcagaccatagccaagatcaacttcaaagttttagattcagaaatggtggctgttgtgacggacaaatggtccccgtggacctgggccagctctgtgagggctttacccttccacccgaaggacatcatgggggcattcagccactcagaaatgcagatgattaaccaatactgcaaagacactcggcagcaacatcagcagggagatgaatcacagaaaatgagaggggactatggcaagttaaaggccctcatcaatagtcggaaaagtagaaacaggaggaatcagttgccagagtcataatattttcttatgtgggtcttatgcttccattaacaaatgctctgtcttcaatgatcaaattttgagcaaagaaacttgtgctttaccaaggggaattactgaaaaaggtgattactcctgaagtgagttttacacgaactgaaatgagcatgcattttcttgtatgatagtgactagcactagacatgtcatggtcctcatggtgcatataaatatatttaacttaacccagattttatttatatctttattcaccttttcttcaaaatcgatatggtggctgcaaaactagaattgttgcatccctcaattgaatgagggccatatccctgtggtattcctttcctgctttggggctttagaattctaattgtcagtgattttgtatatgaaaacaagttccaaatccacagcttttacgtagtaaaagtcataaatgcatatgacagaatggctatcaaaagaaatagaaaaggaagacggcatttaaagttgtataaaaacacgagttattcataaagagaaaatgatgagtttttatggttccaatgaaatatcttcccctttttttaagattgtaaaaataatcagttactggtatctgtcactgacctttgtttccttattcaggaagataaaaatcagtaacctaccccatgaagatatttggtgggagttatatcagtgaagcagtttggtttatattcttatgttatcaccttccaaacaaaagcacttactttttttggaagttatttaatttattttagactcaaagaatataatcttgcactactcagttattactgtttgttctcttattccctagtctgtgtggcaaattaaacaatataagaaggaaaaatttgaagtattagacttctaaataaggggtgaaatcatcagaaagaaaaatcaaagtagaaactactaattttttaagaggaatttataacaaatatggctagttttcaacttcagtactcaaattcaatgattcttccttttattaaaaccagtctcagatatcatactgatttttaagtcaacactatatattttatgatcttttcagtgtgatggcaaggtgcttgttatgtctagaaagtaagaaaacaatatgaggagacattctgtctttcaaaaggtaatggtacatacgttcactggtctctaagtgtaaaagtagtaaattttgtgatgaataaaataattatctcctaattgtatgttagaataattttattagaataatttcatactgaaattattttctccaaataaaaattagatggaaaaatgtgaaaaaaattattcatgctctcatatatattttaaaaacactacttttgcttttttatttaccttttaagacattttcatgcttccaggtaaaaacagatattgtaccatgtacctaatccaaatatcatataaacattttatttatagttaataatctatgatgaaggtaattaaagtagattatggcctttttaagtattgcagtctaaaacttcaaaaactaaaatcattgtcaaaattaatatgattattaatcagaatatcagatatgattcactatttaaactatgataaattatgataatatatgaggaggcctcgctatagcaaaaatagttaaaatgctgacataacaccaaacttcattttttaaaaaatctgttgttccaaatgtgtataattttaaagtaatttctaaagcagtttattataatggtttgcctgcttaaaaggtataattaaacttcttttctcttctacattgacacacagaaatgtgtcaatgtaaagccaaaaccatcttctgtgtttatggccaatctattctcaaagttaaaagtaaaattgtttcagagtcacagttccctttatttcacataagcccaaactgatagacagtaacggtgtttagttttatactatatttgtgctatttaattctttctattttcacaattattaaattgtgtacactttcattacttttaaaaatgtagaaattcttcatgaacataactctgctgaatgtaaaagaaaattttttttcaaaaatgctgttaatgtatactactggtggttgattggttttattttatgtagcttgacaattcagtgacttaatatctattccatttgtattgtacataaaattttctagaaatacacttttttccaaagtgtaagtttgtgaatagattttagcatgatgaaactgtcataatggtgaatgttcaatctgtgtaagaaaacaaactaaatgtagttgtcacactaaaatttaattggatattgatgaaatcattggcctggcaaaataaaacatgttgaattcccc

SEQ ID NO: 359 - protein, 751 aa, Homo sapiens
MAFRTICVLVGVFICSICVKGSSQPQARVYLTFDELRETKTSEYFSLSHHPLDYRILLMDEDQDRIYVGSKDHILSLNINNISQEALSVFWPASTIKVEECKMAGKDPTHGCGNFVRVIQTFNRTHLYVCGSGAFSPVCTYLNRGRRSEDQVFMIDSKCESGKGRCSFNPNVNTVSVMINEELFSGMYIDFMGTDAAIFRSLTKRNAVRTDQHNSKWLSEPMFVDAHVIPDGTDPNDAKVYFFFKEKLTDNNRSTKQIHSMIARICPNDTGGLRSLVNKWTTFLKARLVCSVTDEDGPETHFDELEDVFLLETDNPRTTLVYGIFTTSSSVFKGSAVCVYHLSDIQTVFNGPFAHKEGPNHQLISYQGRIPYPRPGTCPGGAFTPNMRTTKEFPDDVVTFIRNHPLMYNSIYPIHKRPLIVRIGTDYKYTKIAVDRVNAADGRYHVLFLGTDRGTVQKVVVLPTNNSVSGELILEELEVFKNHAPITTMKISSKKQQLYVSSNEGVSQVSLHRCHIYGTACADCCLARDPYCAWDGHSCSRFYPTGKRRSRRQDVRHGNPLTQCRGFNLKAYRNAAEIVQYGVKNNTTFLECAPKSPQASIKWLLQKDKDRRKEVKLNERIIATSQGLLIRSVQGSDQGLYHCIATENSFKQTIAKINFKVLDSEMVAVVTDKWSPWTWASSVRALPFHPKDIMGAFSHSEMQMINQYCKDTRQQHQQGDESQKMRGDYGKLKALINSRKSRNRRNQLPES

SEQ ID NO: 360 - DNA, 1534 bp, Homo sapiens
ggaattccctggagcagagttgagaatggagagaatgttacctctcctggctctggggctcttggcggctgggttctgccctgctgtcctctgccaccctaacagcccacttgacgaggagaatctgacccaggagaaccaagaccgagggacacacgtggacctcggattagcctccgccaacgtggacttcgctttcagcctgtacaagcagttagtcctgaaggcccttgataagaatgtcatcttctccccactgagcatctccaccgccttggccttcctgtctctgggggcccataataccaccctgacagagattctcaaggcctcgagttcacctcacggagacttactgaggcagaaattcactcagagcttccagcacctccgcgcaccctcaatcagttccagcgatgagctgcagctgagtatgggaaatgccatgtttgtcaaagagcaactcagtctgctggacaggttcacggaggatgccaagaggctgtatggctccgaggcctttgccactgactttcaggactcagctgcagctaagaagctcatcaacgactacgtgaagaatggaactagggggaaaatcacagatctgatcaaggaccccgactcgcagacaatgatggtcctggtgaattacatcttctttaaagccaaatgggagatgccctttgacccccaagatactcatcagtcaaggttctacttgagcaagaaaaagtgggtaatggtgcccatgatgagtttgcatcacctgactataccttacttccgggacgaggagctgtcctgcaccgtggtggagctgaagtacacaggcaatgccagcgcactcttcatcctccctgatcaagacaagatggaggaagtggaagccatgctgctcccagagaccctgaagcggtggagagactctctggagttcagagagataggtgagctctacctgccaaagttttccatctcgagggactataacctgaacgacatacttctccagctgggcattgaggaagccttcaccagcaaggctgacctgtcagggatcacaggggccaggaacctagcagtctcccaggtggtccataaggtcgtgtctgatgtatttgaggagggcacagaagcatctgctgccacagcagtcaaaatcaccctcctttctgcattagtggagacaaggaccattgtgcgtttcaacaggcccttcctgatgatcattgtccctacagacacccagaacatcttcttcatgagcaaagtcaccaatcccagcaagcctagagcttgcatcaagcagtggggctctcagtaaggaacttggaatgcaagctggatgcctgggtctctgggcacagctggcccctgtgcaccgtagtggccatggcatgtgtggccctgtctgcttatccttggaaggtgacagcgattccctgtgaagctctcacacgcacaggggcccatggactcttcagtctggagggtcctggcctcctgacagcaataaataatttcgttggcc

SEQ ID NO: 361 - protein, 433 aa, Homo sapiens
MERMLPLLALGLLAAGFCPAVLCHPNSPLDEENLTQENQDRGTHVDLGLASANVDFAFSLYKQLVLKALDKNVIFSPLSISTALAFLSLGAHNTTLTEILKASSSPHGDLLRQKFTQSFQHLRAPSISSSDELQLSMGNAMFVKEQLSLLDRFTEDAKRLYGSEAFATDFQDSAAAKKLINDYVKNGTRGKITDLIKDPDSQTMMVLVNYIFFKAKWEMPFDPQDTHQSRFYLSKKKWVMVPMMSLHHLTIPYFRDEELSCTVVELKYTGNASALFILPDQDKMEEVEAMLLPETLKRWRDSLEFREIGELYLPKFSISRDYNLNDILLQLGIEEAFTSKADLSGITGARNLAVSQVVHKVVSDVFEEGTEASAATAVKITLLSALVETRTIVRFNRPFLMIIVPTDTQNIFFMSKVTNPSKPRACIKQWGSQ

SEQ ID NO: 362 - DNA, 2128 bp, Homo sapiens
ctggaaaccactgcaatgacattattcccagtgctgttgttcctggttgctgggctgcttccatcttttccagcaaatgaagataaggatcccgcttttactgctttgttaaccacccaaacacaagtgcaaagggagattgtgaataagcacaatgaactgaggagagcagtatctccccctgccagaaacatgctgaagatggaatggaacaaagaggctgcagcaaatgcccaaaagtgggcaaaccagtgcaattacagacacagtaacccaaaggatcgaatgacaagtctaaaatgtggtgagaatctctacatgtcaagtgcctccagctcatggtcacaagcaatccaaagctggtttgatgagtacaatgattttgactttggtgtagggccaaagactcccaacgcagtggttggacattatacacaggttgtttggtactcttcatacctcgttggatgtggaaatgcctactgtcccaatcaaaaagttctaaaatactactatgtttgccaatattgtcctgctggtaattgggctaatagactatatgtcccttatgaacaaggagcaccttgtgccagttgcccagataactgtgacgatggactatgcaccaatggttgcaagtacgaagatctctatagtaactgtaaaagtttgaagctcacattaacctgtaaacatcagttggtcagggacagttgcaaggcctcctgcaattgttcaaacagcatttattaaatacgcattacacaccgagtagggctatgtagagaggagtcagattatctacttagatttggcatctacttagatttaacatatactagctgagaaattgtaggcatgtttgatacacatttgatttcaaatgtttttcttctggatctgctttttattttacaaaaatatttttcatacaaatggttaaaaagaaacaaaatctataacaacaactttggatttttatatataaactttgtgatttaaatttactgaatttaattagggtgaaaattttgaaagttgtattctcatatgactaagttcactaaaaccctggattgaaagtgaaaattatgttcctagaacaaaatgtacaaaaagaacaatataattttcacatgaacccttggctgtagttgcctttcctagctccactctaaggctaagcatcttcaaagacgttttcccatatgctgtcttaattcttttcactcattcacccttcttcccaatcatctggctggcatcctcacaattgagttgaagctgttcctcctaaaacaatcctgacttttattttgccaaaatcaatacaatcctttgaattttttatctgcataaattttacagtagaatatgatcaaaccttcatttttaaacctctcttctctttgacaaaacttccttaaaaaagaatacaagataatataggtaaataccctccactcaaggaggtagaactcagtcctctcccttgtgagtcttcactaaaatcagtgactcacttccaaagagtggagtatggaaagggaaacatagtaactttacaggggagaaaaatgacaaatgacgtcttcaccaagtgatcaaaattaacgtcaccagtgataagtcattcagatttgttctagataatctttctaaaaattcataatcccaatctaattatgagctaaaacatccagcaaactcaagttgaaggacattctacaaaatatccctggggtattttagagtattcctcaaaactgtaaaaatcatggaaaataagggaatcctgagaaacaatcacagaccacatgagactaaggagacatgtgagccaaatgcaatgtgcttcttggatcagatcctggaacagaaaaagatcagtaatgaaaaaactgatgaagtctgaatagaatctggagtatttttaacagtagtgttgatttcttaatcttgacaaatatagcagggtaatgtaagatgataacgttagagaaactgaaactgggtgagggctatctaggaattctctgtactatcttaccaaattttcggtaagtctaagaaagcaatgcaaaataaaaagtgtcttgaaaaaaaaaaaaaaaaaaaaaaaaaaaaa

SEQ ID NO: 363 - protein, 245 aa, Homo sapiens
MTLFPVLLFLVAGLLPSFPANEDKDPAFTALLTTQTQVQREIVNKHNELRRAVSPPARNMLKMEWNKEAAANAQKWANQCNYRHSNPKDRMTSLKCGENLYMSSASSSWSQAIQSWFDEYNDFDFGVGPKTPNAVVGHYTQVVWYSSYLVGCGNAYCPNQKVLKYYYVCQYCPAGNWANRLYVPYEQGAPCASCPDNCDDGLCTNGCKYEDLYSNCKSLKLTLTCKHQLVRDSCKASCNCSNSIY

SEQ ID NO: 364 - DNA, 7016 bp, Homo sapiens
  misc_feature 2984: n = A,T,C or G
ccacgcgcccgcgcctcctcgcttcctcggctccagcctccgccggcggagcccactatgccagacagtttcgacactttgcaaagacaaagagccctagaccggagggaggaggaggaggaagaagagcggagagagaaggaagaggcgatgtgagctgggaagggggcaagtgtccgggacacccacacccctgtattctcctccgaaccccttcatgcccaaatcccggaaactccagcgtgtctccagccgtgttggtaccattttcagatttcatcttcctaaactggaaatgtcaatgagaggaaattaacacccccaagagctgcagtgagcaaatgcattgagcttgggtcaggacaattccatttggggaccagagatggacggtcactcagcctatggagatgaagaaactgaggttcagagaggttaagagactccactgaggtcacacagccgatgacagacaaccttctgtgccttcatcaagctggttgtgtacccaccatgtccctggcgacaggatgggaaagaaaaagccctaattaaggatcgtcagaaaccacagttggaggaggacggcagagacagtttccctccccgctataccaacacccttccttcgaggtcctcgctcctgagggaccctggactgtcacagagattaatgaccccttatcttctttggatgtgaaaggaaatcactggttaaagcttgatcgagagacattatcagctctttaaggattgcaggagaataggctactttattttctgaaaaggtaaatatatgcaagcaaagccaacatgccacgaatggcgttggtctaccacacagccgtgtctgggacacagttgggggtcatcccccagcaggagtgaagtcgagcttagcggcccttgtgtcctcccttggaattcctgccatcccttttgattgagcctccacctctgggatttttcttccatttttctcctctcttaggagggagttcctgctacccatcgtgggaggccaccatcaggactgcgaagatggtgaccctgcggaagaggaccctgaaagtgctcaccttcctcgtgctcttcatcttcctcacctccttcttcctgaactactcccacaccatggtggccaccacctggttccccaagcagatggtcctggagctctccgagaacctgaagagactgatcaagcacaggccttgcacctgcacccactgcatcgggcagcgcaagctctcggcctggttcgatgagaggttcaaccagaccatgcagccgctgctgactgcccagaacgcgctcttggaggacgacacctaccgatggtggctgaggctccagcgggagaagaagcccaataacttgaatgacaccatcaaggagctgttcagagtggtgcctgggaatgtggaccctatgctggagaagaggtcggtgggctgccggcgctgcgccgttgtgggcaactcgggcaacctgagggagtcttcttatgggcctgagatagacagtcacgactttgtcctcaggatgaacaaggcgcccacggcagggtttgaagctgatgttgggaccaagaccacccaccatctggtgtaccctgagagcttccgggagctgggagataatgtcagcatgatcctggtgcccttcaagaccatcgacttggagtgggtggtgagcgccatcaccacgggcaccatttcccacacctacatcccggttcctgcaaagatcagagtgaaacaggataagatcctgatctaccacccagccttcatcaagtatgtctttgacaactggctgcaagggcacgggcgatacccatctaccggcatcctctcggtcatcttctcaatgcatgtctgcgatgaggtggacttgtacggcttcggggcagacagcaaagggaactggcaccactactgggagaacaacccatccgcgggggcttttcgcaagacgggggtgcacgatgcagactttgagtctaacgtgacggccaccttggcctccatcaataaaatccggatcttcaaggggagatgacgcagtgaagggctgaggatggacgcactgtcacacctctgcatttccagccccagcatcttgctggagccgttccatcccggagcttggaggggcagcctcaggtgtgtgcctgggcaccgctcacagcctcttgcacccagccgttggcagcatctactcagcaaggtcactaagctctgccagcgtggcagagcatgtcttggaacctgtcttgagtggggacaacgtccccccactgctgccctagagctggggagacgctgggaaaggttcaacctccacacactaaaatcattttggctcctggggcaagcttggggaatgaatgtggaagatgcctatattctgagagacaggacagtttcccaggaagatgggcagagacttgagtggcgattacctccagcacagagacgtgccaggcggtgttggcgctcggggcgagatgctgcccttctttgcacgaagcctggcctcttgcttggcgtgataaccctgtcatcttcccaaagctcatttatgagccaccagaggctcctaccccaaagattttcacagaaacttgaggccaggtgccgtggctcacacctgtaatctgaacactttgggaggccgaggcgggaggatcacttgagcccaggagttcaagaccagcctgggcaacatagtgagactcctgtctctacaaaaataaaagatttaaaaaaattagccaggcacggtggcacacacttgtagccccagctactagggaggctgaggagggaggatctcttgtgcctaggagttcgaggctgcagtgggctgtgatcacaccactgcactccagcctgggcaacagagtgagaccctgtctctgaaaaaaaaaaaaaaagaaaagaaaaaaaaccccaaacttggcaccgtgtttctgactnctgcagatgcctcttcccaagcaagttgttcctttgagtagtcagtctcatggttctaatcgtggcgagagcggatctgaccacttccatgtgccttttgtatttgggaaagaaaagcatgcattggctgaaatgaaacaaaagcccttacttgggaaaagggacccccaccagcggccctgcttgctccgtagctgggaacatcttttctggtttcctgagccagcacctgaattgcaacgaagctctgaggatactcaacaccacccagcagtgcgtyagartggaacgtacattctcattctcagactgttcaatatggtgcccgtaacctccaaagccacacaggaggctgccagcagcattttccccaagggcctgagctcagggtcaagtccctgctggccatcttggggctgtcactgggggtctgggtcaaggacatcccaggaatggtaactgccacatacctcatcttcttactccccagctactctcttttcctcattagccttcctgattatttattgatttcttttttttattcaactgacattgtttgcaccctggctctgttggtggtcctggtgttttaatgaagcttgcctcacccagtagctgggaaattaggtgggggtgcttaagggaggtttgtaggagtcctcggacgtgggatattgggggtatctagggcttggatggtttgtggaatgtcctcagcatcctcccgtcccaacccaaccttccttcttcctcattgtggacttggatttattctcaggctaggagtctccaaaactccgtgaaaccttattgctgctgggtgtggagtggagagtgacaggaatgtgggggacggtgattgttggctccagttactaatgtttaagcagaaaaaccactttcttgttgaaaatatccctgaaaaggtcgctgctgctttgaggaggcgtgactttttcctggtggagtgtgacggaggcatggggcctgtgctcccaggctcgggggagccccctctgcacacggggagggaggaacttggggacatcagtcatgggtcacaggtggcttcaggccattcacaagagtccccggaagttgcgtgccaagtttggttttttccctgaatctctgcatatgagcatttttctggagaaaggaccatagcttttattagattctcaaaggttcagaatggggaatgtgttaaacaaaccgaaaacctgtttcagctttaaaatcctccaaaactttaaagacttttcttttttctgagaaaggctggtaaatcactgagtcatcattcagaacatacagcctcgaagggcagagctcacacccatatatgacgttaagagctcaacaaatgtttgttgagtgactgagtgaccccaggggcagactccagatcatcagacactgatacagagagcgatgctatctcctcaactctccctcttctcctaaaagctgagtctatatagggatgacaggctcaggctgagcagtcgacttctctgggttttgctgtgtaagaataggtccctcagcatgaagatgtgtctgcgtctgagccagatgctgcctgggtcggttgcctggcctccgtctggtctccctccctcctactagggtggtcaagctgtgagatctcttccagcctccaaatccagctttcccattttactgatgagaaaatcaaggccacattgcagctgggtggggagtggagcgtgacaggcacgggagaggacagcgattgttgactctagttcctgatgtttaatcagaaaaaccacttttcctgttgagcacatttcctaaaaggctgctgctgtgtagggaggtgtggccttttcctggtgcagtgtgaaggacggaagtgacgggcagtcgtgaactgtctgggacagatagcacaagtcagagtttgagcaaaactagggtgttaccggcgctatgttgaaattgtctggaggcgggctttcccagcgagtctccattcagcatctggaaaaagtgtaaccagaatggaggtgtctgactctcctgtgctctctcagcgccgagctctagctgcaggctgcctgggtggccttctcacaccctcccgtgcaggagactgcatttctctttcccacagcccagcagatagctcattggcttagcaatgggcacttaacagaatccagttgttgcagccagaattaaatgcaccagtctggcttaaaccaactggaactcatccctggggtgaaggtggctgggaattagacaagagtgtgtgttagccaaaaggcacatgcatgctgtcagcaggagaatgaggagcactggttctgggcaggcagtggcaggggctccctcaggcccctgattcccagcccacagctctttctactctgcagacagagttccttggagactggccctgcattcaggcagggagcagaggggtccctgcctgcagcacccagagctgaacctgaagctacaaagatgggctgatgaggtggcccatgaggtgtcagcaacatcccaaccccctgggtctccccagtgagtcagggcactgatttgctatagctggagctacatgcacctctcctcccctcagccaccttttaggggagaaaggagggcagatttgtaacctctggttctctgcagggatcctgggctggaagaaagttcataaatggatgaatgccttttaaaactccagcttttccaagcatcattcaccaaagcatttggttaggcttagagagaaaagctggatatgagaaaatagaatgtaaaataggagggaaaaaaaaaaagaaggtggagagggcagttaagatctgggtgattctttagggaaacggctggttgagaggctttgatggaatcccattctctgctgtggccagaaggtggtgctagaggccagtcccacttggatgtgaccctggcctctgccaggattcaaaccacaaagaacatttggaactgggatgtttgctttgaagcagcccgaaaacaagtgaaaggaaaccaagataactctctctccctccgctggcaaggatcaaaaataccttgtgcagggaagcccgagcctcgaggggccactgcccagctaaagatgactggacaccagccatgcaccatcaggaaccagcacctgtcctcacccctgagaagagccccgggggtatcattatatccatcgcagacatctggtttgcagcaaatgtggctacacgccatcaggattatcctgccctgtggactgggctagctagttttgagatagagtcaacctccccatttttgtttgtcatgaaaacaccagctcctgcacccctggggtgctacctgacacctgtgcaaagaaaaggaggaaaacttagaagaaaaggcagagacaggcaagacagcatctcacagcttgtcaggatcagggcattaccgactattttttcttaccaaaagagcactgaatttcctaggggaaggtgagccacctttacacctcctgtcctccctcccagcccgtcaagcgatcccatcacccagcctcatcactcagcttcttcctagtacaaaactgccatcggttgtacgtcctgagctgtgggacgtcagctttaaccctagcctgtctcagggcctcgccctccagccccccgccccttagggtgatcgtgggtttcttcccttcctcctgcacaatcgcttcccttcactgaattcccttcaaagccaaagtttcttgagcactttttcttgtgtgcagtcttgtgtgtttgggtgttggtgtttttaaatttgctttctattcccccctgcctctctccatgtcgttacgcagctgagcactggttgggatgcattcgaatgacttcagcaagatcctgctttcctcagcccccgctctgttttatttattgtttaatatttccaatgatccaaatcaaagtgaataaacaaagagctattttattkwwaaaaaaawwaaaaaaaawaaaaaaaaaaaaaaaa

SEQ ID NO: 365 - protein, 340 aa, Homo sapiens
MVTLRKRTLKVLTFLVLFIFLTSFFLNYSHTMVATTWFPKQMVLELSENLKRLIKHRPCTCTHCIGQRKLSAWFDERFNQTMQPLLTAQNALLEDDTYRWWLRLQREKKPNNLNDTIKELFRVVPGNVDPMLEKRSVGCRRCAVVGNSGNLRESSYGPEIDSHDFVLRMNKAPTAGFEADVGTKTTHHLVYPESFRELGDNVSMILVPFKTIDLEWVVSAITTGTISHTYIPVPAKIRVKQDKILIYHPAFIKYVFDNWLQGHGRYPSTGILSVIFSMHVCDEVDLYGFGADSKGNWHHYWENNPSAGAFRKTGVHDADFESNVTATLASINKIRIFKGR

SEQ ID NO: 366 - DNA, 2685 bp, Homo sapiens
cgaggagagagagagagtaaggagccagccatgaatcctttccagaaaaatgagtccaaggaaactcttttttcacctgtctccattgaagaggtaccacctcgaccacctagccctccaaagaagccatctccgacaatctgtggctccaactatccactgagcattgccttcattgtggtgaatgaattctgcgagcgcttttcctattatggaatgaaagctgtgctgatcctgtatttcctgtatttcctgcactggaatgaagatacctccacatctatataccatgccttcagcagcctctgttattttactcccatcctgggagcagccattgctgactcgtggttgggaaaattcaagacaatcatctatctctccttggtgtatgtgcttggccatgtgatcaagtccttgggtgccttaccaatactgggaggacaagtggtacacacagtcctatcattgatcggcctgagtctaatagctttggggacaggaggcatcaaaccctgtgtggcagcttttggtggagaccagtttgaagaaaaacatgcagaggaacggactagatacttctcagtcttctacctgtccatcaatgcagggagcttgatttctacatttatcacacccatgctgagaggagatgtgcaatgttttggagaagactgctatgcattggcttttggagttccaggactgctcatggtaattgcacttgttgtgtttgcaatgggaagcaaaatatacaataaaccaccccctgaaggaaacatagtggctcaagttttcaaatgtatctggtttgctatttccaatcgtttcaagaaccgttctggagacattccaaagcgacacgactggctagactgggcggctgagaaatatccaaagcagctcattatggatgtaaaggcactgaccagggtactattcctttatatcccattgcccatgttctgggctcttttggatcagcagggttcacgatggactttgcaagccatcaggatgaataggaatttggggttttttgtgcttcagccggaccagatgcaggttctaaatccccttctggttcttatcttcatcccgttgtttgactttgtcatttatcgtctggtctccaagtgtggaattaacttctcatcacttaggaaaatggctgttggtatgatcctagcatgcctggcatttgcagttgcggcacgtgtagagataaaaataaatgaaatggccccagcccagccaggtccccaggaggttttcctacaagtcttgaatctggcagatgatgaggtgaaggtgacagtggtgggaaatgaaaacaattctctgttgatagagtccatcaaatcctttcagaaaacaccacactattccaaactgcacctgaaaacaaaaagccaggattttcacttccacctgaaatatcacaatttgtctctctacactgagcattctgtgcaggagaagaactggtacagtcttgtcattcgtgaagatgggaacagtatctccagcatgatggtaaaggatacagaaagcagaacaaccaatgggatgacaaccgtgaggtttgttaacactttgcataaagatgtcaacatctccctgagtacagatacctctctcaatgttggtgaagactatggtgtgtctgcttatagaactgtgcaaagaggagaataccctgcagtgcactgtagaacagaagataagaacttttctctgaatttgggtcttctagactttggtgcagcatatctgtttgttattactaataacaccaatcagggtcttcaggcctggaagattgaagacattccagccaacaaaatgtccattcggtggcagctaccacaatatgccctggttacagctggggaggtcatgttctctgtcacaggtcttgagttttcttattctcaggctccctctagcatgaaatctgtgctccaggcagcttggctattgacaattgcagttgggaatatcatcgtgcttgttgtggcacagttcagtggcctggtacagtgggccgaattcattttgttttcctgcctcctgctggtgatctgcctgatcttctccatcatgggctactactatgttcctgtaaagacagaggatatgcggggtccagcagataagcacattcctcacatccaggggaacatgatcaaactagagaccaagaagacaaaactctgatgactccctagattctgtcctaaccccaattccctggccctgtcttgaagcattttttttcttctactggattagacaagagagatagcagcatatcagagctgatctcctccacctttctccaatgacagaagttccaggactggttttccagtacatctttaaacaaggccccagagactctatgtctgcccgtccatcagtgaactcattaaaacttgtgcagtgttgctggagctggcctggtgtctccaaatgaccatgaaaatacacacgtataatggagatcattctctgtgggtatgcaaagttatgggaattcctttataggtaactgccatttaggactgatggccctaatttttgaggtgctgatttagaggcaaaattgcagaataacaaagaaatggtatttcaagtttttttttttataagcaatgtaattatgctattcacaggggcccg

SEQ ID NO: 367 - protein, 729 aa, Homo sapiens
MNPFQKNESKETLFSPVSIEEVPPRPPSPPKKPSPTICGSNYPLSIAFIVVNEFCERFSYYGMKAVLILYFLYFLHWNEDTSTSIYHAFSSLCYFTPILGAAIADSWLGKFKTIIYLSLVYVLGHVIKSLGALPILGGQVVHTVLSLIGLSLIALGTGGIKPCVAAFGGDQFEEKHAEERTRYFSVFYLSINAGSLISTFITPMLRGDVQCFGEDCYALAFGVPGLLMVIALVVFAMGSKIYNKPPPEGNIVAQVFKCIWFAISNRFKNRSGDIPKRHDWLDWAAEKYPKQLIMDVKALTRVLFLYIPLPMFWALLDQQGSRWTLQAIRMNRNLGFFVLQPDQMQVLNPLLVLIFIPLFDFVIYRLVSKCGINFSSLRKMAVGMILACLAFAVAARVEIKINEMAPAQPGPQEVFLQVLNLADDEVKVTVVGNENNSLLIESIKSFQKTPHYSKLHLKTKSQDFHFHLKYHNLSLYTEHSVQEKNWYSLVIREDGNSISSMMVKDTESRTTNGMTTVRFVNTLHKDVNISLSTDTSLNVGEDYGVSAYRTVQRGEYPAVHCRTEDKNFSLNLGLLDFGAAYLFVITNNTNQGLQAWKIEDIPANKMSIRWQLPQYALVTAGEVMFSVTGLEFSYSQAPSSMKSVLQAAWLLTIAVGNIIVLVVAQFSGLVQWAEFILFSCLLLVICLIFSIMGYYYVPVKTEDMRGPADKHIPHIQGNMIKLETKKTKL

SEQ ID NO: 368 - DNA, 3697 bp, Homo sapiens
ctcggacgcgtgggctgcctccggcatctcttcgccggtgcgtcctcgccgcgcccgtaggtcccggcagccgggccccgcctccttcggagtccgagcgatgggcggggaaagggacaggcaggtatagctctgtcggcgccgcggtgtccacctcagtcaggccacggtggaagacgcgtgccgcggcgcctggttgcctgcagcggcccggacccgagaggaagctgaaccatctatctccagaaatgtcttcagaaagtaaagagcaacataacgtttcacccagagactcagctgaaggaaatgacagttatccatctgggatccatctggaacttcaaagggaatcaagtactgacttcaagcaatttgagaccaatgatcaatgcagaccttatcataggatccttattgagcgtcaagagaaatcagatacaaacttcaaggagtttgttattaaaaagctgcagaagaattgccagtgcagtccagccaaagccaaaaatatgattttaggtttccttcctgttttgcagtggctcccaaaatacgacctaaagaaaaacattttaggggatgtgatgtcaggcttgattgtgggcatattattggtgccccagtccattgcttattccctgctggctggccaagaacctgtctatggtctgtacacatctttttttgccagcatcatttattttctcttgggtacctcccgtcacatctctgtgggcatttttggagtactgtgccttatgattggtgagacagttgaccgagaactacagaaagctggctatgacaatgcccatagtgctccttccttaggaatggtttcaaatgggagcacattattaaatcatacatcagacaggatatgtgacaaaagttgctatgcaattatggttggcagcactgtaacctttatagctggagtttatcaggtagcgatgggcttctttcaagtgggttttgtttctgtctacctctcagatgccttgctgagtggatttgtcactggtgcctccttcactattcttacatctcaggccaagtatcttcttgggctcaaccttcctcggactaatggtgtgggctcactcatcactacctggatacatgtcttcagaaacatccataagaccaatctctgtgatcttatcaccagccttttgtgccttttggttcttttgccaaccaaagaactcaatgaacacttcaaatccaagcttaaggcaccgattcctattgaacttgttgttgttgtagcagccacattagcctctcattttggaaaactacatgaaaattataattctagtattgctggacatattcccactgggtttatgccacccaaagtaccagaatggaacctaattcctagtgtggctgtagatgcaatagctatttccatcattggttttgctatcactgtatcactttctgagatgtttgccaagaaacatggttacacagtcaaagcaaaccaggaaatgtatgccattggcttttgtaatatcatcccttccttcttccactgttttactactagtgcagctcttgcaaagacattggttaaagaatcaacaggctgccatactcagctttctggtgtggtaacagccctggttcttttgttggtcctcctagtaatagctcctttgttctattcccttcaaaaaagtgtccttggtgtgatcacaattgtaaatctacggggagcccttcgtaaatttagggatcttcccaaaatgtggagtattagtagaatggatacagttatctggtttgttactatgctgtcctctgcactgctaagtactgaaataggcctacttgttggggtttgtttttctatattttgtgtcatcctccgcactcagaagccaaagagttcactgcttggcttggtggaagagtctgaggtctttgaatctgtgtctgcttacaagaaccttcagactaagccaggcatcaagattttccgctttgtagcccctctctactacataaacaaagaatgctttaaatctgctttatacaaacaaactgtcaacccaatcttaataaaggtggcttggaagaaggcagcaaagagaaagatcaaagaaaaagtagtgactcttggtggaatccaggatgaaatgtcagtgcaactttcccatgatcccttggagctgcatactatagtgattgactgcagtgcaattcaatttttagatacagcagggatccacacactgaaagaagttcgcagagattatgaagccattggaatccaggttctgctggctcagtgcaatcccactgtgagggattccctaaccaacggagaatattgcaaaaaggaagaagaaaaccttctcttctatagtgtgtatgaagcgatggcttttgcagaagtatctaaaaatcagaaaggagtatgtgttcccaatggtctgagtcttagtagtgattaattgagaaggtagatagaagaatgtctagccaataggttaaaatttcaagtgtccaacatttcccagttccacagtgggaaattttgcacacttgaaattttaaccaagtggctagatattattcctcctttgaagctaatggcatttgtatatacacactgcagcagagcttgtagctggacagagtcaaaaagaagaaaatacggtttcaggctttcttgcagatatgaagtattcttggaatgcaataagtatgtattgaactgtactgtaaagtagctccaaaacttaattactctcctgttttaggggttatacatttggactgtgcattctccaagagatgaagcggtgaagttgggatttacattggaagtgctgtagacttctttatgtggctcagtggagagagggaaagaatgttgcacctgctctagtaccataggtcaagaggcttctggatcacaaagtcataactagacaggtttgttcttgtagttttctatccccagtctttgctccccagatggcagtagtttttagtaggaaagtgccattcctgtccttaaggcacagtctcatcagaagtttaatacctgggcaggtttataacatcctgagagccagcctgacattagacagaataccctttgtaatacattggaaatttttactcatgcctttttgtttaggataaataggtaagcacaaagagctcttcaaaatcagaaaaaacaataggagtccttccttgtcttttctgtgatctctgtccttgtttctgagactttctctaccattaagctctattttagctttcagttattctagtttgtttcccatggaatctgtcctaaactggtgtttttgtcagtgacagtcttgccagtcagcaatttctaacagcattttaaatgagtttgatgtacagtaaatattgatgacaatgacagcttttaactcttcaagtcacctaaagctattatgcaggaggatttagaagtcacattcataaaacccaagtgctatgggtgtattattcatgatagctggcccacaggtcatgaattgaggaggaatttgctttcaaaaagcaagaatgtccaacactgaaagtttatagttttatatttggaccttgaaaggtaagaaaaaaccaggttctccaaagttaggaatagggaactaatttatgaaacagccatcttaaaaaaaaaaaaaaaaaaaaa

SEQ ID NO: 369 - protein, 739 aa, Homo sapiens
MSSESKEQHNVSPRDSAEGNDSYPSGIHLELQRESSTDFKQFETNDQCRPYHRILIERQEKSDTNFKEFVIKKLQKNCQCSPAKAKNMILGFLPVLQWLPKYDLKKNILGDVMSGLIVGILLVPQSIAYSLLAGQEPVYGLYTSFFASIIYFLLGTSRHISVGIFGVLCLMIGETVDRELQKAGYDNAHSAPSLGMVSNGSTLLNHTSDRICDKSCYAIMVGSTVTFIAGVYQVAMGFFQVGFVSVYLSDALLSGFVTGASFTILTSQAKYLLGLNLPRTNGVGSLITTWIHVFRNIHKTNLCDLITSLLCLLVLLPTKELNEHFKSKLKAPIPIELVVVVAATLASHFGKLHENYNSSIAGHIPTGFMPPKVPEWNLIPSVAVDAIAISIIGFAITVSLSEMFAKKHGYTVKANQEMYAIGFCNIIPSFFHCFTTSAALAKTLVKESTGCHTQLSGVVTALVLLLVLLVIAPLFYSLQKSVLGVITIVNLRGALRKFRDLPKMWSISRMDTVIWFVTMLSSALLSTEIGLLVGVCFSIFCVILRTQKPKSSLLGLVEESEVFESVSAYKNLQTKPGIKIFRFVAPLYYINKECFKSALYKQTVNPILIKVAWKKAAKRKIKEKVVTLGGIQDEMSVQLSHDPLELHTIVIDCSAIQFLDTAGIHTLKEVRRDYEAIGIQVLLAQCNPTVRDSLTNGEYCKKEEENLLFYSVYEAMAFAEVSKNQKGVCVPNGLSLSSD

SEQ ID NO: 370 - DNA, 2620 bp, Homo sapiens
catcgggggatgatctggaaagcgcgatcagtgaagcggacgaacggcaggataaggcgggtctagtgacaggaatgggccgatgaagctctgtagggatggtgggtaggccgatcgggccgtgtccccggcctcccgatccgacggaatttggaaatcccggggctattcatacattgagcttttaggagcggaggagaaaagccaccaccctgacgatcccggctctcgctccaccttcactcaggtggcccggcagcggaagtgacgaacgcggaagtggtttttctgttgccgaggggacgggccgggcagatgccaacatggcagcggttggggctggtggttccaccgcggcgcccgggccaggggcggtttccgcgggtgcattggagccggggaccgccagtgcggctcacaggcgcctgaagtacatatccctagctgtgctggtggtccagaatgcctccctcatcctcagcatccgctacgcccgcacgttgccaggggaccgcttctttgccaccactgctgtggtcatggcggaagtgctcaaaggtctcacctgcctgctgctgctcttcgcacagaagaggggtaacgtgaagcacctggttctcttcctccatgaggctgtcctggtgcagtatgtggacacgctcaagctcgcagtgccctctctcatctacaccttgcagaataacctccagtatgttgccatctctaacctaccagctgccactttccaggtgacataccagctgaagatcctgaccacagcgctgttctccgtgctcatgctgaatcgcagcctttcccggctgcagtgggcctccctgctgctcctcttcactggcgtcgccattgtccaggcacagcaagccggtgggggaggcccacggccactggatcagaaccctggggcaggcctggcagccgtcgtggcctcctgtctctcctccggcttcgcaggtgtctactttgagaagatcctcaaaggcagctcaggctccgtgtggctgcgcaacctgcaactgggcctcttcggcacagcactgggcctggtggggctctggtgggctgagggtaccgccgtggccacccgtggtttcttttttgggtacacacctgctgtctggggcgtggtgctcaaccaggccttcggcgggctactggtggctgtggttgtcaagtacgctgacaatatcctcaagggctttgccacctccctgtccattgtgctgtccactgttgcctccattcgcctctttggcttccacgtggacccattatttgcccttggcgctggactcgtcattggtgctgtctacctctacagccttccccgaggtgcagccaaagccatagcctctgcctctgcctccgcctccgggccctgcgttcaccagcagcctcccgggcagccaccaccaccgcagctgtcttcccaccgtggagacctcatcacggagccctttctgccaaagtcagtgctggtgaagtgagggctggcagcaatggggggacacaagggagggggactggggtggagggtgttgggcatctgcaggacccaagtcgccaccctccggggcctggctcctctgggtttgggagatggtcttttctcccaggtcactgagacttctggaggggtgtgggactagagctgggtgtcacgtgaacccttcctggtagggtgacccccttcccctggagggggttttagagctgccgcctctgctccctctaacctctttggaggcagggttgggggtattgtcattcaaggccttttttttgtctgctccctccccgaccctgtgccctcttctggaggtttctcgtctgggagagtccctcccagcagtccctccacctccataaggacacactggacaaaactcccgcagctcttcaggaatgaccgatgcctacctgtggggttcagttgcccatagtttgaggccttctctcctcccttaccaccgctctggatcatgttactagttccgtcttttgtgtggccttgggccagcttccttgataccttgaagatgggcttcttgtgagtccccagggagaaagggacaagagctaagatttttgcatcagcccttctggcagaaggtgtggtaggggccatttgttttttttagtggacttgggatttgtggtgtaatcatatcattaatgatccagggtgtgggaaaaatggaggtccttgaagtggctgaatctcattgtatttaagacactgtcagttgccagatgtaggcttatttttggagatgtctaggagaggaaaaagctaccaatcatactcttgatatccgtctggctgtgtgaggcacccctacctcatgggggtgtcttgggattgatgaactgtggaacctgcctcctgcgctccccaaagcttattaaccccttaactgtatcggggcggggtgtgtgtgtgcatggaagatgcctgggctgtctttgctatatgtaaatagagccattggatctttatttttgattaatttgttctgattttttggtttgttttttaaggaactgtaatgaacaaatgtcaggatatccaatgccaaataaagatgttgtatttatttag

SEQ ID NO: 371 - protein, 393 aa, Homo sapiens
MAAVGAGGSTAAPGPGAVSAGALEPGTASAAHRRLKYISLAVLVVQNASLILSIRYARTLPGDRFFATTAVVMAEVLKGLTCLLLLFAQKRGNVKHLVLFLHEAVLVQYVDTLKLAVPSLIYTLQNNLQYVAISNLPAATFQVTYQLKILTTALFSVLMLNRSLSRLQWASLLLLFTGVAIVQAQQAGGGGPRPLDQNPGAGLAAVVASCLSSGFAGVYFEKILKGSSGSVWLRNLQLGLFGTALGLVGLWWAEGTAVATRGFFFGYTPAVWGVVLNQAFGGLLVAVVVKYADNILKGFATSLSIVLSTVASIRLFGFHVDPLFALGAGLVIGAVYLYSLPRGAAKAIASASASASGPCVHQQPPGQPPPPQLSSHRGDLITEPFLPKSVLVK

SEQ ID NO: 372 - DNA, 7586 bp, Homo sapiens
gttctttgtgacacatcacacagaattggagtgctgtccttctggagagtggtggagaaccaagatacagttcagaaccaaaggaatagagaagggctttgatttctttttggctttagattggggatttgggaggcttagcaggaaagatgtccactgaaaatgtggaagggaagcccagtaaccttggggagagaggaagagcccggagctccactttcctcagggttgtccagccaatgtttaaccacagtattttcacttctgcagtctctcctgctgcagaacgcatccgattcatcttgggagaggaggatgacagcccagctccccctcagctcttcacggaactggatgagctgctggccgtggatgggcaggagatggagtggaaggaaacagccaggtggatcaagtttgaagaaaaagtggaacagggtggggaaagatggagcaagccccatgtggccacattgtcccttcatagtttatttgagctgaggacatgtatggagaaaggatccatcatgcttgatcgggaggcttcttctctcccacagttggtggagatgattgttgaccatcagattgagacaggcctattgaaacctgaacttaaggataaggtgacctatactttgctccggaagcaccggcatcaaaccaagaaatccaaccttcggtccctggctgacattgggaagacagtctccagtgcaagtaggatgtttaccaaccctgataatggtagcccagccatgacccataggaatctgacttcctccagtctgaatgacatttctgataaaccggagaaggaccagctgaagaataagttcatgaaaaaattgccacgtgatgcagaagcttccaacgtgcttgttggggaggttgactttttggatactcctttcattgcctttgttaggctacagcaggctgtcatgctgggtgccctgactgaagttcctgtgcccacaaggttcttgttcattctcttaggtcctaaggggaaagccaagtcctaccacgagattggcagagccattgccaccctgatgtctgatgaggtgttccatgacattgcttataaagcaaaagacaggcacgacctgattgctggtattgatgagttcctagatgaagtcatcgtccttccacctggggaatgggatccagcaattaggatagagcctcctaagagtcttccatcctctgacaaaagaaagaatatgtactcaggtggagagaatgttcagatgaatggggatacgccccatgatggaggtcacggaggaggaggacatggggattgtgaagaattgcagcgaactggacggttctgtggtggactaattaaagacataaagaggaaagcgccattttttgccagtgatttttatgatgctttaaatattcaagctctttcggcaattctcttcatttatctggcaactgtaactaatgctatcacttttggaggactgcttggggatgccactgacaacatgcagggcgtgttggagagtttcctgggcactgctgtctctggagccatcttttgcctttttgctggtcaaccactcactattctgagcagcaccggacctgtcctagtttttgagaggcttctatttaatttcagcaaggacaataattttgactatttggagtttcgcctttggattggcctgtggtccgccttcctatgtctcattttggtagccactgatgccagcttcttggttcaatacttcacacgtttcacggaggagggcttttcctctctgattagcttcatctttatctatgatgctttcaagaagatgatcaagcttgcagattactaccccatcaactccaacttcaaagtgggctacaacactctcttttcctgtacctgtgtgccacctgacccagctaatatctcaatatctaatgacaccacactggccccagagtatttgccaactatgtcttctactgacatgtaccataatactacctttgactgggcatttttgtcgaagaaggagtgttcaaaatacggaggaaaccttgtcgggaacaactgtaattttgttcctgatatcacactcatgtcttttatcctcttcttgggaacctacacctcttccatggctctgaaaaaattcaaaactagtccttattttccaaccacagcaagaaaactgatcagtgattttgccattatcttgtccattctcatcttttgtgtaatagatgccctagtaggcgtggacaccccaaaactaattgtgccaagtgagttcaagccaacaagtccaaaccgaggttggttcgttccaccgtttggagaaaacccctggtgggtgtgccttgctgctgctatcccggctttgttggtcactatactgattttcatggaccaacaaattacagctgtgattgtaaacaggaaagaacataaactcaagaaaggagcagggtatcacttggatctcttttgggtggccatcctcatggttatatgctccctcatggctcttccgtggtatgtagctgctacggtcatctccattgctcacatcgacagtttgaagatggagacagagacttctgcacctggagaacaaccaaagtttctaggagtgagggaacaaagagtcactggaacccttgtgtttattctgactggtctgtcagtctttatggctcccatcttgaagtttatacccatgcctgtactctatggtgtgttcctgtatatgggagtagcatcccttaatggtgtgcagttcatggatcgtctgaagctgcttctgatgcctctgaagcatcagcctgacttcatctacctgcgtcatgttcctctgcgcagagtccacctgttcactttcctgcaggtgttgtgtctggccctgctttggatcctcaagtcaacggtggctgctatcatttttccagtaatgatcttggcacttgtagctgtcagaaaaggcatggactacctcttctcccagcatgacctcagcttcctggatgatgtcattccagaaaaggacaagaaaaagaaggaggatgagaagaaaaagaaaaagaagaagggaagtctggacagtgacaatgatgattctgactgcccatactcagaaaaagttccaagtattaaaattccaatggacatcatggaacagcaacctttcctaagcgatagcaaaccttctgacagagaaagatcaccaacattccttgaacgccacacatcatgctgataaaattcctttccttcagtcactcggtatgccaagtcctcctagaactccagtaaaagttgcctcaaattagactagaacttgaacctgaagacaatgattatttctggaggagcaagggaacagaaactacattgtaacctgtttgtctttcttaaaactgacatttgttgttaatgtcatttgtttttgtttggctgtttgtttattttttaacttttatttcgtctcagtttttggtcacaggccaaataatacagcgctctctctgcttctctcttgcatagatacaatcaagacaatagtgcaccgttccttaaaaacagcatctgaggaatcccccttttgttcttaaactttcagatgtgtcctttgataaccaaattctgtcactcaagacacagacacccacagaccctgtcctttgcctctattaagcagaggatggaagtattaaggattttgtaacaccttttatgaaaatgttgaaggaacttaaaactttagctttggagctgtgcttactggcttgtctttgtctggtagaacaaaccttgacctccagacagagtcccttctcacttatagagctctccaggactggaaaaagtgctgctattttaacttgctcttgcttgtaaatcctaatcttagagttatcaaaagaagaaaaaactgaaggtactttactccctatagagaaaccattgccatcattgtagcaagtgctggaatgtcccttttttcctatgcaacttttttataaccctttaatgaacttatctgtggagtacattgaagaatatttttcttcctagattttgttgtttaaattatggggcctaacctgccacttattttttgtcaatttttaaaacttttttttaattactgtaaagaaaatgaattttttcctgcagcaggaaacatagttttcagtagttctacctcttatttgtagctgccaggctttctgtaaaaattgtattgtatataatgtgatttttacacatacatacacacacaaatacacaatctctagggtaagccagaaggcaagatcagattaaaaacaccatgtttctaagcatccatttttccctttctttaaaagaaacttaactgttctatgaaggagattgagggagaagagacaaactcctatgtcatgagaataaccgatgttctgataatagtagcatctaggtacagatgctggttgtattaccacgtcaatgtcctatgcagtattgttagacattttctcattttgaaatatttgtgtgtttgtgtatgtgctctgtgccatggctggtgtatatatgtgcaatgttagaaggcaaaagagtgatggtaggcagagggcaaagtcattgaatctcttatgccagttttcataaaacccaaaccacatatgaaaaaatccattaagggtccaagaagtctgtccatatgaaaatgagggtaaatatagtttatttcccaggtatcagtcattataattgatataatagctctaacatgcaatataaaattcataggagtattaatagcccatttacacatctataaaatgtaatgggattgcagagctgcagagtacagtgtaacagtactctcatgcaatttttttcaggatgcaaaggcaattattctttgtaagcgggacatttagatatatttgtgtacatattatatgtatgtatatttcaaagtaccacactgaaaattagacatttattaaccaaatttaacgtggtatttaaaggtaatatttttaatatgatacattacatattgtgaatgtatactaaaaaaacattttaaatgttaaaattataatttcagattcatataaccacaactgtgatatatcctaactataaccagttgttgaggggtatactagaagcagaatgaaaccacattttttggtttgataatatgcacttattgactcccactcattgttatgttaattaagttattattctgtctccttgtaattttgattacaaaaattttattatcctgagttagctgttacttttacagtacctgatactcctaaaacttttaacttatacaaattagtcaataatgaccccaattttttcattaaaataatagtggtgaattatatgttattgtgttaaaacctcacttgccaaattctggcttcacatttgtatttagggctatccttaaaatgatgagtctatattatctagctttctattaccctaatataaactggtataagaagactttccttttttctttatgcatggaagcatcaataaattgtttaaaaaccatgtatagtaaattcagcttaacccgtgatcttcttaagttaaaggtacttttgttttataaaagctctagataaaactttcttttctgatcatgaatcaagtatctgtggtttcatgcccctctctatacctttcaaagaactcctgaagcaacttaactcatcatttcagcctctgagtagaggtaaaacctatgtgtacttctgtttatgatccatattgatatttatgacatgaacacagaatagtaccttacatttgctaaacagacagttaatatcaaatcctttcaatattctgggaacccagggaagtttttaaaaatgtcattactttcaaaggaacagaagtagttaaccaaactaacaagcaaaacctgaggtttacctagtgacaccaaattatcggtattttaactgaatttacccattgactaagaatgaaccggatttggtggtggttttgtttctatgcaaactggacacaaattacaacagtaaatttttttataagtgcttctcccttctccatgatgtgacttccggagataaaggattcaaaagataaagacaaagtacgctcagagttgttaaccagaaagtcctggctgtggttgcagaaacactgttggaagaaaagagatgactaagtcaagtgtctgccttatcaaaagagcaaaaatgcctctggttttgtgtttgggagaaaaatatcttggacgcactgttttccttgataaaagtcatcttctctactgtgtgaaatgaatacttggaattctaattgttttgtgtgccaggggcagtaatgtccctgcctcttctcccaatcaaggttgaggagtggggctggggagaggacttaactgacttaagaagtaggaaaacaaaaacctctctcctcagccttccacctccaagagaggaggaaaaacagttgtctgctgtctgtaattcagtttgcgtgtattttatgctcatgcaccaacccatacagagtaaatcttttatcaactatatactggtgtttaatagagaatgattgtcttccgagttttttggttccttttttaactgtgttaaagtacttgaaatgtattgactgctgactatattttaaaaacaaaatgaaataatttgagttgtattacagaggttgacattgttcagggatgggacaaagccttcttcaatccttttcatactacttaatgattttggtgcaggaacctgagattttctgatttatatttcatgatatttcacatttgctcttcacagcatgagcatgaagcccagtggcaccaaatggctgggtacaatcaagtgatattttgtagcacctcactatctgaaaggccatgagttttcagatgatttcattgagcttcattgcagcctgaaattttaaaaaagttgtgtaatacgccaaccagtcaagttgtgttttggccagagatttagatatgtccaatttcctggctcatttcattgtgctctatgggtacgtataaaaagcaagaattctgtttcctaggcaaacattgcaactcagggctaaagtcatccagtgaaacttttagagccagaagtaactttgtcccagtcctacaatgtgaaaagagtgaatagttgcctctttttagccattttcatggctggtacatattcgtacgcattacttttcagaatcaatacgcactttcagatattcttatttttattctcttaagtctttattaactttggagagagaaatgatgcatctttttattttaaatgaagtagatcaacatggtggaacaaaatgataaagaacagaaaacatttcaatatattactaataactttttccaatataaatcctaaaattcctataacatagtattttacagttttatgaagctttctattgtgacttttatggaattaagagatgaagaagatgagatattttagcatttatatttttcaaaattatatgtatacttaaaaataaagtaactttatgc

SEQ ID NO: 373 - protein, 1035 aa, Homo sapiens
MSTENVEGKPSNLGERGRARSSTFLRVVQPMFNHSIFTSAVSPAAERIRFILGEEDDSPAPPQLFTELDELLAVDGQEMEWKETARWIKFEEKVEQGGERWSKPHVATLSLHSLFELRTCMEKGSIMLDREASSLPQLVEMIVDHQIETGLLKPELKDKVTYTLLRKHRHQTKKSNLRSLADIGKTVSSASRMFTNPDNGSPAMTHRNLTSSSLNDISDKPEKDQLKNKFMKKLPRDAEASNVLVGEVDFLDTPFIAFVRLQQAVMLGALTEVPVPTRFLFILLGPKGKAKSYHEIGRAIATLMSDEVFHDIAYKAKDRHDLIAGIDEFLDEVIVLPPGEWDPAIRIEPPKSLPSSDKRKNMYSGGENVQMNGDTPHDGGHGGGGHGDCEELQRTGRFCGGLIKDIKRKAPFFASDFYDALNIQALSAILFIYLATVTNAITFGGLLGDATDNMQGVLESFLGTAVSGAIFCLFAGQPLTILSSTGPVLVFERLLFNFSKDNNFDYLEFRLWIGLWSAFLCLILVATDASFLVQYFTRFTEEGFSSLISFIFIYDAFKKMIKLADYYPINSNFKVGYNTLFSCTCVPPDPANISISNDTTLAPEYLPTMSSTDMYHNTTFDWAFLSKKECSKYGGNLVGNNCNFVPDITLMSFILFLGTYTSSMALKKFKTSPYFPTTARKLISDFAIILSILIFCVIDALVGVDTPKLIVPSEFKPTSPNRGWFVPPFGENPWWVCLAAAIPALLVTILIFMDQQITAVIVNRKEHKLKKGAGYHLDLFWVAILMVICSLMALPWYVAATVISIAHIDSLKMETETSAPGEQPKFLGVREQRVTGTLVFILTGLSVFMAPILKFIPMPVLYGVFLYMGVASLNGVQFMDRLKLLLMPLKHQPDFIYLRHVPLRRVHLFTFLQVLCLALLWILKSTVAAIIFPVMILALVAVRKGMDYLFSQHDLSFLDDVIPEKDKKKKEDEKKKKKKKGSLDSDNDDSDCPYSEKVPSIKIPMDIMEQQPFLSDSKPSDRERSPTFLERHTSC

SEQ ID NO: 374 - DNA, 594 bp, Homo sapiens
gtcactcctgccttcaccatgaagtccagcggcctcttccccttcctggtgctgcttgccctgggaactctggcaccttgggctgtggaaggctctggaaagtccttcaaagctggagtctgtcctcctaagaaatctgcccagtgccttagatacaagaaacctgagtgccagagtgactggcagtgtccagggaagaagagatgttgtcctgacacttgtggcatcaaatgcctggatcctgttgacaccccaaacccaacaaggaggaagcctgggaagtgcccagtgacttatggccaatgtttgatgcttaacccccccaatttctgtgagatggatggccagtgcaagcgtgacttgaagtgttgcatgggcatgtgtgggaaatcctgcgtttcccctgtgaaagcttgattcctgccatatggaggaggctctggagtcctgctctgtgtggtccaggtcctttccaccctgagacttggctccaccactgatatcctcctttggggaaaggcttggcacacagcaggctttcaagaagtgccagttgatcaatgaataaataaacgagcctatttctctttgcac

SEQ ID NO: 375 - protein, 132 aa, Homo sapiens
MKSSGLFPFLVLLALGTLAPWAVEGSGKSFKAGVCPPKKSAQCLRYKKPECQSDWQCPGKKRCCPDTCGIKCLDPVDTPNPTRRKPGKCPVTYGQCLMLNPPNFCEMDGQCKRDLKCCMGMCGKSCVSPVKA

SEQ ID NO: 376 - DNA, 1612 bp, Homo sapiens
tagtgaggcgaggccctgtgccatgcctggggcagcagcacggcacagcacgctcgacttcatgctcggcgccaaagctgatggtgagaccattctaaaaggcctccagtccattttccaggagcaggggatggcggagtcggtgcacacctggcaggaccatggctatttagcaacctacacaaacaagaacggcagctttgccaatttgagaatttacccacatggattggtgttgctggaccttcagagttatgatggtgatgcgcaaggcaaagaagagatcgacagtattttgaacaaagtagaggaaagaatgaaagaattgagtcaggacagtactgggcgggtgaaacgattaccacccatagtgcgaggaggagccatcgacagatactggcccaccgccgacgggcgcctggttgaatatgacatagatgaagtggtatatgacgaagattcaccttatcaaaatataaaaattctacactcgaagcagtttggaaatattctcatccttagtggggatgttaatttggcagagagtgatttggcatatacccgggccatcatgggcagtggcaaagaagattacactggcaaagatgtactcattctgggaggtggagacggaggcatattgtgtgaaatagtcaaactaaaaccaaagatggtcactatggtagagattgaccaaatggtgattgatgggtgtaagaaatacatgcgaaaaacgtgtggcgatgtcttagacaatcttaaaggagactgctatcaggttctaatagaagactgtatcccggtactgaagaggtacgccaaagaagggagagaatttgattatgtgattaatgatttgacagctgttccaatctccacgtctccagaagaagattccacatgggagtttctcagactgattcttgacctctcaatgaaagtgttgaaacaggatgggaaatattttacacaggggaactgtgtcaatctgacagaagcactgtcgctctatgaagaacagctggggcgcctgtattgtcctgtggaattttcaaaggagatcgtctgtgtcccttcatacttggaattgtgggtattttacactgtttggaagaaagctaaaccctgaagatcagtagcccctaatcacatgtgctgcaaatagccttcctgacctccatatgctgtacatgacatcaaaatgagtcaggcaattgattgtgaattccttaaagttttcctttttttaataattatttttaatttaaaaaagcaaatggaaaatgtatattttgatgagcttagggtgttttttttttgaaagtcagctgaaggatggttagacagcacagcgaagactgctaaatgcactgaccccccccattagaatgtgatttttgttcctttttatttctctgtgggcttttgtttttgtttttgttttggtagatcttcaatttggatatttggaggagtgaacatcgttgttttgctggagggaagatcttgatggtgtttctttccccaaaaattgacttagatattaaaatttggtgcttataagagagagttaaaaaaaaataggattgcttcaattaaaattacaaaagag

SEQ ID NO: 377 - protein, 368 aa, Homo sapiens
MPGAAARHSTLDFMLGAKADGETILKGLQSIFQEQGMAESVHTWQDHGYLATYTNKNGSFANLRIYPHGLVLLDLQSYDGDAQGKEEIDSILNKVEERMKELSQDSTGRVKRLPPIVRGGAIDRYWPTADGRLVEYDIDEVVYDEDSPYQNIKILHSKQFGNILILSGDVNLAESDLAYTRAIMGSGKEDYTGKDVLILGGGDGGILCEIVKLKPKMVTMVEIDQMVIDGCKKYMRKTCGDVLDNLKGDCYQVLIEDCIPVLKRYAKEGREFDYVINDLTAVPISTSPEEDSTWEFLRLILDLSMKVLKQDGKYFTQGNCVNLTEALSLYEEQLGRLYCPVEFSKEIVCVPSYLELWVFYTVWKKAKP

SEQ ID NO: 378 - DNA, 1808 bp, Homo sapiens
gcctagtcccgcccctgcgtgcggcgcttctcccaggccccaccttccatccagtgccctggaccctcggctgggtagcgccaccagagcgaccaaacgtcccgcgccttccaggccgcactccagagccaaaagagctccatggcggcggcggccaagcccaacaacctttccctggtggtgcacggaccgggggacttgcgcctggagaactatcctatccctgaaccaggcccaaatgaggtcttgctgaggatgcattctgttggaatctgtggctcagatgtccactactgggagtatggtcgaattgggaattttattgtgaaaaagcccatggtgctgggacatgaagcttcgggaacagtcgaaaaagtgggatcatcggtaaagcacctaaaaccaggtgatcgtgttgccatcgagcctggtgctccccgagaaaatgatgaattctgcaagatgggccgatacaatctgtcaccttccatcttcttctgtgccacgccccccgatgacgggaacctctgccggttctataagcacaatgcagccttttgttacaagcttcctgacaatgtcacctttgaggaaggcgccctgatcgagccactttctgtggggatccatgcctgcaggagaggcggagttaccctgggacacaaggtccttgtgtgtggagctgggccaatcgggatggtcactttgctcgtggccaaagcaatgggagcagctcaagtagtggtgactgatctgtctgctacccgattgtccaaagccaaggagattggggctgatttagtcctccagatctccaaggagagccctcaggaaatcgccaggaaagtagaaggtcagctggggtgcaagccggaagtcaccatcgagtgcacgggggcagaggcctccatccaggcgggcatctacgccactcgctctggtgggaccctcgtgcttgtggggctgggctctgagatgaccaccgtacccctactgcatgcagccatccgggaggtggatatcaagggcgtgtttcgatactgcaacacgtggccagtggcgatttcgatgcttgcgtccaagtctgtgaatgtaaaacccctcgtcacccataggtttcctctggagaaagctctggaggcctttgaaacatttaaaaagggattggggttgaaaatcatgctcaagtgtgaccccagtgaccagaatccctgatgttaatgggctctgctcatccccacagtcttgggatctcagggcacaatggctggacatgggtgggctctgatgcagaactttctcttttgaatgttaagaataactaatacaattcattgtgaacagaagtccttaagcagaggaattggtgtgccttaaagatacaatctgggatagtttgggggaacttgtagccagaatgccctgttcatgctgagcaaagttcagcaagtagagcagagtttggcaggcaggtgccaggaactccccttcttcctggagtgccttcattgaggaaggaaatctggcccttgggtttcctggttccactgctactgacccagaggggaatgagggctgagttatgaaaagataacttcatgaagacttaactggcccagaagctgattttcatgaaaatctgccactcagggtctgggatgaaggcttgtcagcacttccagtttagaacgcaatgtttctagagacatattggctgtttgttttgatgataaaaggagaataagaaaaggcatcactttcctggatccaggataatttttaaaccaatcaaatgaaaaaaacaaaca

SEQ ID NO: 379 - protein, 357 aa, Homo sapiens
MAAAAKPNNLSLVVHGPGDLRLENYPIPEPGPNEVLLRMHSVGICGSDVHYWEYGRIGNFIVKKPMVLGHEASGTVEKVGSSVKHLKPGDRVAIEPGAPRENDEFCKMGRYNLSPSIFFCATPPDDGNLCRFYKHNAAFCYKLPDNVTFEEGALIEPLSVGIHACRRGGVTLGHKVLVCGAGPIGMVTLLVAKAMGAAQVVVTDLSATRLSKAKEIGADLVLQISKESPQEIARKVEGQLGCKPEVTIECTGAEASIQAGIYATRSGGTLVLVGLGSEMTTVPLLHAAIREVDIKGVFRYCNTWPVAISMLASKSVNVKPLVTHRFPLEKALEAFETFKKGLGLKIMLKCDPSDQNP

SEQ ID NO: 380 - DNA, 3233 bp, Homo sapiens
gctctaagctgcagcaagagaaactgtgtgtgaggggaagaggcctgtttcgctgtcgggtctctagttcttgcacgctctttaagagtctgcactggaggaactcctgccattaccagctcccttcttgcagawgggagggggaaacatacatttattcatgccagtctgttgcatgcaggctttttggcttcctaccttgcaacaaaataattgcaccaactccttagtgccggattccgcccacagagagtcctgkatgccacagtcttttttgctttgcattgtaggagagggactaagtgctagagactatgtcgctttcctgagctaccgagagcgctcgtgaactggaatcaactgcttcagggaaaaagaaaaaaaaaaaaaaaagacttgcctgggaggccgcgagaaacttgcattggaagcttcagcaaccagcattcgagaaactcctctctactttagcacggtctccagactcagccgagagacagcaaactgcagcgcggtgagagagcgagagagagggagagagagactctccagcctgggaactataactcctctgcgagaggcggagaactccttccccaaatcttttggggacttttctctctttacccacctccgcccctgcgaggagttgaggggccagttcggccgccgcgcgcgtcttcccgttcggcgtgtgcttggcccggggaaccgggagggcccggcgatcgcgcggcggccgccgcgagggtgtgagcgcgcgtgggcgcccgccgagccgaggccatggtgcagcaaaccaacaatgccgagaacacggaagcgctgctggccggcgagagctcggactcgggcgccggcctcgagctgggaatcgcctcctcccccacgcccggctccaccgcctccacgggcggcaaggccgacgacccgagctggtgcaagaccccgagtgggcacatcaagcgacccatgaacgccttcatggtgtggtcgcagatcgagcggcgcaagatcatggagcagtcgcccgacatgcacaacgccgagatctccaagcggctgggcaaacgctggaagctgctcaaagacagcgacaagatccctttcattcgagaggcggagcggctgcgcctcaagcacatggctgactaccccgactacaagtaccggcccaggaagaaggtgaagtccggcaacgccaactccagctcctcggccgccgcctcctccaagccgggggagaagggagacaaggtcggtggcagtggcgggggcggccatgggggcggcggcggcggcgggagcagcaacgcggggggaggaggcggcggtgcgagtggcggcggcgccaactccaaaccggcgcagaaaaagagctgcggctccaaagtggcgggcggcgcgggcggtggggttagcaaaccgcacgccaagctcatcctggcaggcggcggcggcggcgggaaagcagcggctgccgccgccgcctccttcgccgccgaacaggcgggggccgccgccctgctgcccctgggcgccgccgccgaccaccactcgctgtacaaggcgcggactcccagcgcctcggcctccgcctcctcggcagcctcggcctccgcagcgctcgcggccccgggcaagcacctggcggagaagaaggtgaagcgcgtctacctgttcggcggcctgggcacgtcgtcgtcgcccgtgggcggcgtgggcgcgggagccgaccccagcgaccccctgggcctgtacgaggaggagggcgcgggctgctcgcccgacgcgcccagcctgagcggccgcagcagcgccgcctcgtcccccgccgccggccgctcgcccgccgaccaccgcggctacgccagcctgcgcgccgcctcgcccgccccgtccagcgcgccctcgcacgcgtcctcctcggcctcgtcccactcctcctcttcctcctcctcgggctcctcgtcctccgacgacgagttcgaagacgacctgctcgacctgaaccccagctcaaactttgagagcatgtccctgggcagcttcagttcgtcgtcggcgctcgaccgggacctggattttaacttcgagcccggctccggctcgcacttcgagttcccggactactgcacgcccgaggtgagcgagatgatctcgggagactggctcgagtccagcatctccaacctggttttcacctactgaagggcgcgcaggcagggagaagggccggggggggtaggagaggagaaaaaaaaagtgaaaaaaagaaacgaaaaggacagacgaagagtttaaagagaaaagggaaaaaagaaagaaaaagtaagcagggctcgttcgcccgcgttctcgtcgtcggatcaaggagcgcggcggcgttttggacccgcgctcccatcccccaccttcccgggccggggacccactctgcccagccggagggacgcggaggaggaagagggtagacaggggcgacctgtgattgttgttattgatgttgttgttgatggcaaaaaaaaaaagcgacttcgagtttgctcccctttgcttgaagagaccccctcccccttccaacgagcttccggacttgtctgcacccccagcaagaaggcgagttagttttctagagacttgaaggagtctcccccttcctgcatcaccaccttggttttgttttattttgcttcttggtcaagaaaggaggggagaacccagcgcacccctccccccctttttttaaacgcgtgatgaagacagaaggctccggggtgacgaatttggccgatggcagatgttttgggggaacgccgggactgagagactccacgcaggcgaattcccgtttggggcctttttttcctccctcttttccccttgccccctctgcagccggaggaggagatgttgaggggaggaggccagccagtgtgaccggcgctaggaaatgacccgagaaccccgttggaagcgcagcagcgggagctaggggcgggggcggaggaggacacgaactggaagggggttcacggtcaaactgaaatggatttgcacgttggggagctggcggcggcggctgctgggcctccgccttcttttctacgtgaaatcagtgaggtgagacttcccagaccccggaggcgtggaggagaggagactgtttgatgtggtacaggggcagtcagtggagggcgagtggtttcggaaaaaaaaaaagaaaaaaaggg

SEQ ID NO: 381 - protein, 474 aa, Homo sapiens
MVQQTNNAENTEALLAGESSDSGAGLELGIASSPTPGSTASTGGKADDPSWCKTPSGHIKRPMNAFMVWSQIERRKIMEQSPDMHNAEISKRLGKRWKLLKDSDKIPFIREAERLRLKHMADYPDYKYRPRKKVKSGNANSSSSAAASSKPGEKGDKVGGSGGGGHGGGGGGGSSNAGGGGGGASGGGANSKPAQKKSCGSKVAGGAGGGVSKPHAKLILAGGGGGGKAAAAAAASFAAEQAGAAALLPLGAAADHHSLYKARTPSASASASSAASASAALAAPGKHLAEKKVKRVYLFGGLGTSSSPVGGVGAGADPSDPLGLYEEEGAGCSPDAPSLSGRSSAASSPAAGRSPADHRGYASLRAASPAPSSAPSHASSSASSHSSSSSSSGSSSSDDEFEDDLLDLNPSSNFESMSLGSFSSSSALDRDLDFNFEPGSGSHFEFPDYCTPEVSEMISGDWLESSISNLVFTY

SEQ ID NO: 382 - DNA, 5111 bp, Homo sapiens
cactctctgttgtccaatggacacacctgtcgtgttttgagccagcgagagatgcagtggaagtgaaaagcatggttacagactccccatgcgacagtacactcttctgaagtagcggacgcctggttagcttgacattctatgcaaagatccataatgtggttcctgcagatggcacagttatcaaccacaatatcccaggcccagagggctactgcattccactttttcacttcaaagcgcttcttgcccgcgccgctgttggtgccgctcggggtatccacatccatcgctgcgggctcacaaagcggccagacgctcggcggcggcgtgtggcaggagcgcaggggcgcgagccggcgatcagccttcccggcgaccgtgccgcgggagctcgagcaactcggactaggggacccgggccggcccccaagatgccggcgatcgcggtattggcggcggccgccgcggcgtggtgcttcctccaagtcgagagccggcacctggacgcgctcgccggaggcgcgggccccaaccacggcaatttcctagacaatgaccagtggctgagcaccgtctcccagtacgaccgggacaagtactggaaccgctttcgagacgatgattatttcagaaactggaatcccaacaagccctttgaccaagccctggacccatccaaggacccctgcctgaaggtaaaatgcagccctcacaaagtgtgtgtgacccaggactaccagaccgccctgtgtgtcagccgcaagcacctgctccccaggcaaaagaaggggaacgtggcccagaaacactgggttggaccttcgaatttggtcaagtgcaagccctgtcccgtggcacagtcagccatggtctgcggctcagatggccactcctacacatccaagtgcaaattggagttccatgcttgttctactggcaaaagcctcgccaccctctgtgatgggccctgtccctgtctcccagagcctgagccaccaaagcacaaggcagaaaggagtgcctgcacagacaaggagttgcggaaccttgcctcccggctgaaggattggtttggagctctccacgaggatgcgaacagagtcatcaagcccaccagctccaacacagcccaaggcaggtttgacactagcatcctgcccatctgcaaggactccctgggctggatgttcaacaagttggacatgaactatgacctcctgcttgacccttcagagatcaatgccatctacctggataagtacgagccctgtatcaagcctcttttcaactcgtgtgactccttcaaggatggcaagctttctaacaatgagtggtgctactgcttccagaagcctggaggtctcccttgccagaatgaaatgaacagaattcagaagctgagtaaggggaaaagcctgttgggggccttcatacctcggtgtaatgaggagggctattacaaagccacacagtgccacggcagcacggggcagtgctggtgtgtggacaaatatgggaatgagttggctggctccaggaaacagggtgctgtgagctgtgaagaggagcaggaaacctcaggggattttggcagtggtgggtccgtggtcctgctggatgacctagaatatgaacgggagctgggaccaaaggacaaagaggggaagctgagggtgcacacccgagccgtgacagaggatgatgaggatgaggatgatgacaaagaggatgaggtcgggtacatatggtagtgcccacaagaaagaggacacaagttttgcacaaaattgcaagtcacttcctattcctgcatttgtatctaagactccaaggcaccaaggtctcttctccattgttgctctctatacccgacctaaggtttggaagacaactgcttgttcccagaggattctgattttgcatatgtttgtatgggagaaagggtgttgtgtttttttttttgttgttgtttattttttggatagggaagtcattggcttaattagagcctccttcctttctgtgagatttttccaacaagcatgtgatttacgtggaattctgacagtgcagggagcccccaccctcttaaatgtcaaagaccctttttgattacccacactggtggttattacagcatggttcccagccttacagtgtctaagtgcttctcttgtgtcctgtagatgttgtgaaaaagaaaaaaacaaaaaatacaccacactgtactttttccccctgcccccgctactgccggtgattattattaaaaattagtttttttcacatcattatatctggcttcctataaacaacagccttaattcagtcaagactccctttgggaattcattttattaaaaattggtgtctggatacttccctgtacatgcataaatatgcatgcatgtacaggaagactgtatgtgtgtgccttgcacacacacccatacctctcagaaaaagtgggtatattaaaaactcgaaaaacaatgataaatttctcagcttgtccagacctggaacaaaatttctggaataagaaatttgtattaaagtccttttttgcactaacagttggctcttgtagcctgcaggctgaggaagtctcttctctgtgcatcagcagagttactgaaagcctctgattgagaaaaaacctccgtctgcctaaatcacttttctcgcagaagccatgcgactcccacacgacacgggcagcttcacaagccatctctttcatttctgcttgaagcccccttggctgcagcaatcctgtctgccataggtttcttccttccttacctactcaagggctttttctaaggcatgcacacatatctcctgttctctgagagtaccatggtgttccttaaaagaagaaaatttctaattctgaactcaatgttttgcttttactccctttctactgacaaatcatgataagggcacaaaagctgtacagatttttttttttaaccactcaatcccaaatggaggcctacaaagaacatcgtaataacacatggaagcaaaccctgggtttttaagagcaaattctgtccccccctcactcccccaagtgacaagatactaatgaagaaagttcttcaccatagtgtttgttttaactaaactcattggagtctagttccaaatttggtagggtcatcatctctacattccttaggatttctctccctatcaagctggcccagatacaagtaccaaacagtagtctctgaagttcccccatttccttcagtaccagtctataagctactgtccgccactgattttcatctatcagggtgtcctaatcagaatcagccacccaagcaagcctctctggcccacatatctatctcttgccttcccccatgaacttcagcctgtccacacaaaagccacataaactcaagcaagaaatatgttcagccaaaacatgattatagtggcagctgaccaatcccccatcccaaattgaccatttagatgtaccaactcaccttaaattagcatgttccaatccagtcggcattgcctgaatacagtagcatcatacctatagttggtcttagataagaaatgaactacttgatatagcaaagtcctttggcttcgtaaataaccctgaggttttgtacttactttccccataggaagacagaccataggcaaactctgttttgggatctcaactccatcacctttgtttcaatattttttttctctcttgaacaaaactgagataatttagaaaacaggtgcttaattgcaataaaattactatgaagtatattaaaaatcacgacattgtaaaatctcactttagatcatcaaagaaaaccattgttactatctcctttgagcttaggaaaatgtacaagagaacaaattaaaattgaaaaattgatttcacttagaaaaacttctaggaacagggtgaaccactgattttaatttgcctaattatcttatgacaagtatcaaattaagatgacacttaaagatccttagcattaacttaatgatggagaagagtgctcaacagacagttcccagtaaggtaatgagatgccattttccgagacattctaagaagatattttgattcattaaaacattaaataaaaagccctcctcagattggaacccccaaatcgatggagtcacattaataatacttttcatgcctcactttgacatgacagcattcgatttttttaaagatctttaatactttccatgagtactaaagattgtaatgagttaccttatccttagaagtagaatgtttgctttcttcttcttggaaatagtcctccaaaaagtccacttgtaccagtgacaagaagtcacttgtatagtgaccaagtacacataaaataccgattataaaaatattgtaataaaccacttcctcatttgatactggtattaagctgaatcctcactaattcacttttgaaaagttcttaatgaacagttttattcttataccatgaacagctcttttaatacaatttccttggtatccaacttaaatcccagaattttgttccaccatggttagttatttgccatatgaatgtattcttgtttctaccaatattctaggcatgagaataccttaatactgagttggagattttgtatctgtttctcctcctttacgcccattttcctacccacagcagcaaatgacaacgtgtctgtccaggtctgtccccctgctcatcccaggatgccactcacatttttttcttctttgttacccttgacccacgctgtacaagtaacatccaagagcccattctacaagtgggtggttttggtctttttataactttttctcaaagtcactgatgtttgttcctgttaaatgtatagcattgtaatgagagcccatcaaatcctgagtgtcagtttgttgtccctattgtagatgaaatagtgatgtagcaaaaacctagtaaattctgaatgcttttccacgtagacttatctggaatgtgaacacaactctttggttaatagtaaatgcttaactgtagtcctgagtaggtgcatttctgtctgtctcaataaattttactttgtctgca

SEQ ID NO: 383 - protein, 439 aa, Homo sapiens
MPAIAVLAAAAAAWCFLQVESRHLDALAGGAGPNHGNFLDNDQWLSTVSQYDRDKYWNRFRDDDYFRNWNPNKPFDQALDPSKDPCLKVKCSPHKVCVTQDYQTALCVSRKHLLPRQKKGNVAQKHWVGPSNLVKCKPCPVAQSAMVCGSDGHSYTSKCKLEFHACSTGKSLATLCDGPCPCLPEPEPPKHKAERSACTDKELRNLASRLKDWFGALHEDANRVIKPTSSNTAQGRFDTSILPICKDSLGWMFNKLDMNYDLLLDPSEINAIYLDKYEPCIKPLFNSCDSFKDGKLSNNEWCYCFQKPGGLPCQNEMNRIQKLSKGKSLLGAFIPRCNEEGYYKATQCHGSTGQCWCVDKYGNELAGSRKQGAVSCEEEQETSGDFGSGGSVVLLDDLEYERELGPKDKEGKLRVHTRAVTEDDEDEDDDKEDEVGYIW

SEQ ID NO: 384 - DNA, 1807 bp, Homo sapiens
gcacgagggaagagggtgatccgacccggggaaggtcgctgggcagggcgagttgggaaagcggcagcccccgccgcccccgcagccccttctcctcctttctcccacgtcctatctgcctctcgctggaggccaggccgtgcagcatcgaagacaggaggaactggagcctcattggccggcccggggcgccggcctcgggcttaaataggagctccgggctctggctgggacccgaccgctgccggccgcgctcccgctgctcctgccgggtgatggaaaaccccagcccggccgccgccctgggcaaggccctctgcgctctcctcctggccactctcggcgccgccggccagcctcttgggggagagtccatctgttccgccagagccccggccaaatacagcatcaccttcacgggcaagtggagccagacggccttccccaagcagtaccccctgttccgcccccctgcgcagtggtcttcgctgctgggggccgcgcatagctccgactacagcatgtggaggaagaaccagtacgtcagtaacgggctgcgcgactttgcggagcgcggcgaggcctgggcgctgatgaaggagatcgaggcggcgggggaggcgctgcagagcgtgcacgcggtgttttcggcgcccgccgtccccagcggcaccgggcagacgtcggcggagctggaggtgcagcgcaggcactcgctggtctcgtttgtggtgcgcatcgtgcccagccccgactggttcgtgggcgtggacagcctggacctgtgcgacggggaccgttggcgggaacaggcggcgctggacctgtacccctacgacgccgggacggacagcggcttcaccttctcctcccccaacttcgccaccatcccgcaggacacggtgaccgagataacgtcctcctctcccagccacccggccaactccttctactacccgcggctgaaggccctgcctcccatcgccagggtgacactggtgcggctgcgacagagccccagggccttcatccctcccgccccagtcctgcccagcagggacaatgagattgtagacagcgcctcagttccagaaacgccgctggactgcgaggtctccctgtggtcgtcctggggactgtgcggaggccactgtgggaggctcgggaccaagagcaggactcgctacgtccgggtccagcccgccaacaacgggagcccctgccccgagctcgaagaagaggctgagtgcgtccctgataactgcgtctaagaccagagccccgcagcccctggggcccccggagccatggggtgtcgggggctcctgtgcaggctcatgctgcaggcggccgaggcacagggggtttcgcgctgctcctgaccgcggtgaggccgcgccgaccatctctgcactgaagggccctctggtggccggcacgggcattgggaaacagcctcctcctttcccaaccttgcttcttaggggcccccgtgtcccgtctgctctcagcctcctcctcctgcaggataaagtcatccccaaggctccagctactctaaattatggtctccttataagttattgctgctccaggagattgtccttcatcgtccaggggcctggctcccacgtggttgcagatacctcagacctggtgctctaggctgtgctgagcccactctcccgagggcgcatccaagcgggggccacttgagaagtgaataaatggggcggtttcggaagcgtcagtgtttccatgttatggatctctctgcgtttgaataaagactatctctgttgctcac

SEQ ID NO: 385 - protein, 331 aa, Homo sapiens
MENPSPAAALGKALCALLLATLGAAGQPLGGESICSARAPAKYSITFTGKWSQTAFPKQYPLFRPPAQWSSLLGAAHSSDYSMWRKNQYVSNGLRDFAERGEAWALMKEIEAAGEALQSVHAVFSAPAVPSGTGQTSAELEVQRRHSLVSFVVRIVPSPDWFVGVDSLDLCDGDRWREQAALDLYPYDAGTDSGFTFSSPNFATIPQDTVTEITSSSPSHPANSFYYPRLKALPPIARVTLVRLRQSPRAFIPPAPVLPSRDNEIVDSASVPETPLDCEVSLWSSWGLCGGHCGRLGTKSRTRYVRVQPANNGSPCPELEEEAECVPDNCV

SEQ ID NO: 386 - DNA, 2938 bp, Homo sapiens
gtgggggcgtgcgacggttactctggttactggggccgcgccgcgctggcgagagccgccgcccgcgagggatgctggtgaggaagccgtcgggagccgccgccgccatctgagggaggtaccctggaaaccaccttttatcggtggggaagtgcagtcgcggtgggcggctctgggggccagcgaaacgggaggcctctaaatctttaggttggggctgcattgccctggagccgcactcttgagtccgaggccatcttttgttggagaaggcgtcggcgttggcgttttcccgaggttgggctgtacagtgtctccgtccgcggaaaaagaagcctctgaacccgcgccggcccgcagcccccgtgccttccggccgctgctcgccgtcgccagaggctaggccacgtttcccccagtgccgaggtgtttctgtgaccctccctccactcccattcccttctgaaagggcacctgctcttggtgagaaaagaaattatagcacgaagagccagtatcagaagagtatccatcacccgcagcaaccgctcagggaacaccatcaaaaaagaaaaaaagggaatatctggatttcctgggcgaggaggagcgagtctgctcgggagctgttccagcaggcgatttttaaatactgctttctacgccctatacaacttggcttcacatacttttacactaactttatatgatttttaaaaactggtctgatcggacttctcgtcctgggacactgtttactggagtctggccggctctccgtgctcctcttggtacctcattttggggagaaccttaaacccactcgagcagataatctccgccttgaccggtgccaccaaagaagccttggaaccatgtggacttttctgggcattgccactttcacctatttttataagaagttcggggacttcatcactttggccaacagggaggtcctgttgtgcgtgctggtgttcctctcgctgggcctggtgctctcctaccgctgtcgccaccgaaacgggggtctcctcgggcgccagcagagcggctcccagttcgccctcttctcggatattctctcaggcctgcctttcattggcttcttctgggccaaatccccccctgaatcagaaaataaggagcagctcgaggccaggaggcgcagaaaaggaaccaatatttcagaaacaagcttaataggaacagctgcctgtacatcaacatcttctcagaatgacccagaagttatcatcgtgggagctggcgtgcttggctctgctttggcagctgtgctttccagagatggaagaaaggtgacagtcattgagagagacttaaaagagcctgacagaatagttggagaattcctgcaaccgggtggttatcatgttctaaaagaccttggtcttggagatacagtggaaggtcttgatgcccaggttgtaaatggttacatgattcatgatcaggaaagcaaatcagaggttcagattccttaccctctgtcagaaaacaatcaagtgcagagtggaagagctttccatcacggaagattcatcatgagtctccggaaagcagctatggcagagcccaatgcaaagtttattgaaggtgttgtgttacagttattagaggaagatgatgttgtgatgggagttcagtacaaggataaagagactggagatatcaaggaactccatgctccactgactgttgttgcagatgggcttttctccaagttcaggaaaagcctggtctccaataaagtttctgtatcatctcattttgttggctttcttatgaagaatgcaccacagtttaaagcaaatcatgctgaacttattttagctaacccgagtccagttctcatctaccggatttcatccagtgaaactcgagtacttgttgacattagaggagaaatgccaaggaatttaagagaatacatggttgaaaaaatttacccacaaatacctgatcacctgaaagaaccattcttagaagccactgacaattctcatctgaggtccatgctagcaagcttccttcctccttcatcagtgaagaaacgaggtgttcttcttttgggagacgcatataatatgaggcatccacttactggtggaggaatgactgttgcttttaaagatataaaactatggagaaaactgctaaagggtatccctgacctttatgatgatgcagctattttcgaggccaacaaatcattttactgggcaagaaaaacatctcattcctttgtcgtgaatatccttgctcaggctctttatgaattattttctgccacagatgattccctgcatcaactaagaaaagcctgttttctttatttcaaacttggtggcgaatgtgttgcgggtcctgttgggctgctttctgtattgtctcctaaccctctagctttaattggacacttctttgctgttgcaatctatgccgtgtatttttgctttaagtcagaaccttggattacaaaacctcgagcccttctcagtagtagtgctgtattgtacaaagcgtgttctgtaatatttcctctaatttactcagaaatgaagtatatggttcattaagcttaaaggggaaccatttgtgaatgaatatttggaacttaccaagtcctaagagacttttggaagaggatatatatagcatagtaccataccacttataaagtggaaactcttggaccaagatttggattaatttgtttttgaagttttttgtatataaatatgtaaatacatgctttaatttgcaatttaaaatgaaggggttaaataagttagacatttgaaagaaatgattgttaccataaattagtgctaatgctgaggagaactacagtttttcttttgaatttagtatttgagatgagttgttgggacatgcaaataaaatgaagaatgac

SEQ ID NO: 387 - protein, 574 aa, Homo sapiens
MWTFLGIATFTYFYKKFGDFITLANREVLLCVLVFLSLGLVLSYRCRHRNGGLLGRQQSGSQFALFSDILSGLPFIGFFWAKSPPESENKEQLEARRRRKGTNISETSLIGTAACTSTSSQNDPEVIIVGAGVLGSALAAVLSRDGRKVTVIERDLKEPDRIVGEFLQPGGYHVLKDLGLGDTVEGLDAQVVNGYMIHDQESKSEVQIPYPLSENNQVQSGRAFHHGRFIMSLRKAAMAEPNAKFIEGVVLQLLEEDDVVMGVQYKDKETGDIKELHAPLTVVADGLFSKFRKSLVSNKVSVSSHFVGFLMKNAPQFKANHAELILANPSPVLIYRISSSETRVLVDIRGEMPRNLREYMVEKIYPQIPDHLKEPFLEATDNSHLRSMLASFLPPSSVKKRGVLLLGDAYNMRHPLTGGGMTVAFKDIKLWRKLLKGIPDLYDDAAIFEANKSFYWARKTSHSFVVNILAQALYELFSATDDSLHQLRKACFLYFKLGGECVAGPVGLLSVLSPNPLALIGHFFAVAIYAVYFCFKSEPWITKPRALLSSSAVLYKACSVIFPLIYSEMKYMVH

SEQ ID NO: 388 - DNA, 3304 bp, Homo sapiens
gcttgactgaatggcagccagtgtcggggtggcggctgggaatgggggccgctccggacttccgctgccaactacaagggggcgggtccgaggggggttagccgaagttgtaggcggggcgcgaggttctagtacccgagctcatactagggacgggaagtcgcgaccagagccattggagggcgcggggactgcaaccctaatcagagcccaaatggcgcagtgggaaatgctgcagaatcttgacagcccctttcaggatcagctgcaccagctttactcgcacagcctcctgcctgtggacattcgacagtacttggctgtctggattgaagaccagaactggcaggaagctgcacttgggagtgatgattccaaggctaccatgctattcttccacttcttggatcagctgaactatgagtgtggccgttgcagccaggacccagagtccttgttgctgcagcacaatttgcggaaattctgccgggacattcagcccttttcccaggatcctacccagttggctgagatgatctttaacctccttctggaagaaaaaagaattttgatccaggctcagagggcccaattggaacaaggagagccagttctcgaaacacctgtggagagccagcaacatgagattgaatcccggatcctggatttaagggctatgatggagaagctggtaaaatccatcagccaactgaaagaccagcaggatgtcttctgcttccgatataagatccaggccaaagggaagacaccctctctggacccccatcagaccaaagagcagaagattctgcaggaaactctcaatgaactggacaaaaggagaaaggaggtgctggatgcctccaaagcactgctaggccgattaactaccctaatcgagctactgctgccaaagttggaggagtggaaggcccagcagcaaaaagcctgcatcagagctcccattgaccacgggttggaacagctggagacatggttcacagctggagcaaagctgttgtttcacctgaggcagctgctgaaggagctgaagggactgagttgcctggttagctatcaggatgaccctctgaccaaaggggtggacctacgcaacgcccaggtcacagagttgctacagcgtctgctccacagagcctttgtggtagaaacccagccctgcatgccccaaactccccatcgacccctcatcctcaagactggcagcaagttcaccgtccgaacaaggctgctggtgagactccaggaaggcaatgagtcactgactgtggaagtctccattgacaggaatcctcctcaattacaaggcttccggaagttcaacattctgacttcaaaccagaaaactttgacccccgagaaggggcagagtcagggtttgatttgggactttggttacctgactctggtggagcaacgttcaggtggttcaggaaagggcagcaataaggggccactaggtgtgacagaggaactgcacatcatcagcttcacggtcaaatatacctaccagggtctgaagcaggagctgaaagtgagtgaaaatggagggcaaggagagagaaagcagctttggaagaaggcataagaaggggataaacagaagcctcttgggggcagaactgtaggactgaggatccattattgtcctgggctgacttcactaagcgagagagccctcctggcaagttaccattctggacatggctggacaaaattctggagttggtacatgaccacctgaaggatctctggaatgatggacgcatcatgggctttgtgagtcggagccaggagcgccggctgctgaagaagaccatgtctggcacctttctactgcgcttcagtgaatcgtcagaagggggcattacctgctcctgggtggagcaccaggatgatgacaaggtgctcatctactctgtgcaaccgtacacgaaggaggtgctgcagtcactcccgctgactgaaatcatccgccattaccagttgctcactgaggagaatatacctgaaaacccactgcgcttcctctatccccgaatcccccgggatgaagcttttgggtgctactaccaggagaaagttaatctccaggaacggaggaaatacctgaaacacaggctcattgtggtctctaatagacaggtggatgaactgcaacaaccgctggagcttaagccagagccagagctggagtcattagagctggaactagggctggtgccagagccagagctcagcctggacttagagccactgctgaaggcagggctggatctggggccagagctagagtctgtgctggagtccactctggagcctgtgatagagcccacactatgcatggtatcacaaacagtgccagagccagaccaaggacctgtatcacagccagtgccagagccagatttgccctgtgatctgagacatttgaacactgagccaatggaaatcttcagaaactgtgtaaagattgaagaaatcatgccgaatggtgacccactgttggctggccagaacaccgtggatgaggtttacgtctcccgccccagccacttctacactgatggacccttgatgccttctgacttctaggaaccacatttcctctgttcttttcatatctctttgcccttcctactcctcatagcatgatattgttctccaaggatgggaatcaggcatgtgtcccttccaagctgtgttaactgttcaaactcaggcctgtgtgactccattggggtgagaggtgaaagcataacatgggtacagaggggacaacaatgaatcagaacagatgctgagccataggtctaaataggatcctggaggctgcctgctgtgctgggaggtataggggtcctgggggcaggccagggcagttgacaggtacttggagggctcagggcagtggcttctttccagtatggaaggatttcaacattttaatagttggttaggctaaactggtgcatactggcattggccttggtggggagcacagacacaggataggactccatttctttcttccattccttcatgtctaggataacttgctttcttctttcctttactcctggctcaagccctgaatttcttcttttcctgcaggggttgagagctttctgccttagcctaccatgtgaaactctaccctgaagaaagggatggataggaagtagacctctttttcttaccagtctcctcccctactctgccccctaagctggctgtacctgttcctcccccataaaatgatcctgccaatctaaaaaaaaaa

SEQ ID NO: 389 - protein, 532 aa, Homo sapiens
MAASVGVAAGNGGRSGLPLPTTRGRVRGGLAEVVGGARGSSTRAHTRDGKSRPEPLEGAGTATLIRAQMAQWEMLQNLDSPFQDQLHQLYSHSLLPVDIRQYLAVWIEDQNWQEAALGSDDSKATMLFFHFLDQLNYECGRCSQDPESLLLQHNLRKFCRDIQPFSQDPTQLAEMIFNLLLEEKRILIQAQRAQLEQGEPVLETPVESQQHEIESRILDLRAMMEKLVKSISQLKDQQDVFCFRYKIQAKGKTPSLDPHQTKEQKILQETLNELDKRRKEVLDASKALLGRLTTLIELLLPKLEEWKAQQQKACIRAPIDHGLEQLETWFTAGAKLLFHLRQLLKELKGLSCLVSYQDDPLTKGVDLRNAQVTELLQRLLHRAFVVETQPCMPQTPHRPLILKTGSKFTVRTRLLVRLQEGNESLTVEVSIDRNPPQLQGFRKFNILTSNQKTLTPEKGQSQGLIWDFGYLTLVEQRSGGSGKGSNKGPLGVTEELHIISFTVKYTYQGLKQELKVSENGGQGERKQLWKKA

SEQ ID NO: 390 - DNA, 3292 bp, Homo sapiens
gcttgactgaatggcagccagtgtcggggtggcggctgggaatgggggccgctccggacttccgctgccaactacaagggggcgggtccgaggggggttagccgaagttgtaggcggggcgcgaggttctagtacccgagctcatactagggacgggaagtcgcgaccagagccattggagggcgcggggactgcaaccctaatcagagcccaaatggcgcagtgggaaatgctgcagaatcttgacagcccctttcaggatcagctgcaccagctttactcgcacagcctcctgcctgtggacattcgacagtacttggctgtctggattgaagaccagaactggcaggaagctgcacttgggagtgatgattccaaggctaccatgctattcttccacttcttggatcagctgaactatgagtgtggccgttgcagccaggacccagagtccttgttgctgcagcacaatttgcggaaattctgccgggacattcaggatcctacccagttggctgagatgatctttaacctccttctggaagaaaaaagaattttgatccaggctcagagggcccaattggaacaaggagagccagttctcgaaacacctgtggagagccagcaacatgagattgaatcccggatcctggatttaagggctatgatggagaagctggtaaaatccatcagccaactgaaagaccagcaggatgtcttctgcttccgatataagatccaggccaaagggaagacaccctctctggacccccatcagaccaaagagcagaagattctgcaggaaactctcaatgaactggacaaaaggagaaaggaggtgctggatgcctccaaagcactgctaggccgattaactaccctaatcgagctactgctgccaaagttggaggagtggaaggcccagcagcaaaaagcctgcatcagagctcccattgaccacgggttggaacagctggagacatggttcacagctggagcaaagctgttgtttcacctgaggcagctgctgaaggagctgaagggactgagttgcctggttagctatcaggatgaccctctgaccaaaggggtggacctacgcaacgcccaggtcacagagttgctacagcgtctgctccacagagcctttgtggtagaaacccagccctgcatgccccaaactccccatcgacccctcatcctcaagactggcagcaagttcaccgtccgaacaaggctgctggtgagactccaggaaggcaatgagtcactgactgtggaagtctccattgacaggaatcctcctcaattacaaggcttccggaagttcaacattctgacttcaaaccagaaaactttgacccccgagaaggggcagagtcagggtttgatttgggactttggttacctgactctggtggagcaacgttcaggtggttcaggaaagggcagcaataaggggccactaggtgtgacagaggaactgcacatcatcagcttcacggtcaaatatacctaccagggtctgaagcaggagctgaaagtgagtgaaaatggagggcaaggagagagaaagcagctttggaagaaggcataagaaggggataaacagaagcctcttgggggcagaactgtaggactgaggatccattattgtcctgggctgacttcactaagcgagagagccctcctggcaagttaccattctggacatggctggacaaaattctggagttggtacatgaccacctgaaggatctctggaatgatggacgcatcatgggctttgtgagtcggagccaggagcgccggctgctgaagaagaccatgtctggcacctttctactgcgcttcagtgaatcgtcagaagggggcattacctgctcctgggtggagcaccaggatgatgacaaggtgctcatctactctgtgcaaccgtacacgaaggaggtgctgcagtcactcccgctgactgaaatcatccgccattaccagttgctcactgaggagaatatacctgaaaacccactgcgcttcctctatccccgaatcccccgggatgaagcttttgggtgctactaccaggagaaagttaatctccaggaacggaggaaatacctgaaacacaggctcattgtggtctctaatagacaggtggatgaactgcaacaaccgctggagcttaagccagagccagagctggagtcattagagctggaactagggctggtgccagagccagagctcagcctggacttagagccactgctgaaggcagggctggatctggggccagagctagagtctgtgctggagtccactctggagcctgtgatagagcccacactatgcatggtatcacaaacagtgccagagccagaccaaggacctgtatcacagccagtgccagagccagatttgccctgtgatctgagacatttgaacactgagccaatggaaatcttcagaaactgtgtaaagattgaagaaatcatgccgaatggtgacccactgttggctggccagaacaccgtggatgaggtttacgtctcccgccccagccacttctacactgatggacccttgatgccttctgacttctaggaaccacatttcctctgttcttttcatatctctttgcccttcctactcctcatagcatgatattgttctccaaggatgggaatcaggcatgtgtcccttccaagctgtgttaactgttcaaactcaggcctgtgtgactccattggggtgagaggtgaaagcataacatgggtacagaggggacaacaatgaatcagaacagatgctgagccataggtctaaataggatcctggaggctgcctgctgtgctgggaggtataggggtcctgggggcaggccagggcagttgacaggtacttggagggctcagggcagtggcttctttccagtatggaaggatttcaacattttaatagttggttaggctaaactggtgcatactggcattggccttggtggggagcacagacacaggataggactccatttctttcttccattccttcatgtctaggataacttgctttcttctttcctttactcctggctcaagccctgaatttcttcttttcctgcaggggttgagagctttctgccttagcctaccatgtgaaactctaccctgaagaaagggatggataggaagtagacctctttttcttaccagtctcctcccctactctgccccctaagctggctgtacctgttcctcccccataaaatgatcctgccaatctaaaaaaaaaa

SEQ ID NO: 391 - protein, 528 aa, Homo sapiens
MAASVGVAAGNGGRSGLPLPTTRGRVRGGLAEVVGGARGSSTRAHTRDGKSRPEPLEGAGTATLIRAQMAQWEMLQNLDSPFQDQLHQLYSHSLLPVDIRQYLAVWIEDQNWQEAALGSDDSKATMLFFHFLDQLNYECGRCSQDPESLLLQHNLRKFCRDIQDPTQLAEMIFNLLLEEKRILIQAQRAQLEQGEPVLETPVESQQHEIESRILDLRAMMEKLVKSISQLKDQQDVFCFRYKIQAKGKTPSLDPHQTKEQKILQETLNELDKRRKEVLDASKALLGRLTTLIELLLPKLEEWKAQQQKACIRAPIDHGLEQLETWFTAGAKLLFHLRQLLKELKGLSCLVSYQDDPLTKGVDLRNAQVTELLQRLLHRAFVVETQPCMPQTPHRPLILKTGSKFTVRTRLLVRLQEGNESLTVEVSIDRNPPQLQGFRKFNILTSNQKTLTPEKGQSQGLIWDFGYLTLVEQRSGGSGKGSNKGPLGVTEELHIISFTVKYTYQGLKQELKVSENGGQGERKQLWKKA

SEQ ID NO: 392 - DNA, 3446 bp, Homo sapiens
gcttgactgaatggcagccagtgtcggggtggcggctgggaatgggggccgctccggacttccgctgccaactacaagggggcgggtccgaggggggttagccgaagttgtaggcggggcgcgaggttctagtacccgagctcatactagggacgggaagtcgcgaccagagccattggagggcgcggggactgcaaccctaatcagagcccaaatggcgcagtgggaaatgctgcagaatcttgacagcccctttcaggatcagctgcaccagctttactcgcacagcctcctgcctgtggacattcgacagtacttggctgtctggattgaagaccagaactggcaggaagctgcacttgggagtgatgattccaaggctaccatgctattcttccacttcttggatcagctgaactatgagtgtggccgttgcagccaggacccagagtccttgttgctgcagcacaatttgcggaaattctgccgggacattcaggatcctacccagttggctgagatgatctttaacctccttctggaagaaaaaagaattttgatccaggctcagagggcccaattggaacaaggagagccagttctcgaaacacctgtggagagccagcaacatgagattgaatcccggatcctggatttaagggctatgatggagaagctggtaaaatccatcagccaactgaaagaccagcaggatgtcttctgcttccgatataagatccaggccaaagggaagacaccctctctggacccccatcagaccaaagagcagaagattctgcaggaaactctcaatgaactggacaaaaggagaaaggaggtgctggatgcctccaaagcactgctaggccgattaactaccctaatcgagctactgctgccaaagttggaggagtggaaggcccagcagcaaaaagcctgcatcagagctcccattgaccacgggttggaacagctggagacatggttcacagctggagcaaagctgttgtttcacctgaggcagctgctgaaggagctgaagggactgagttgcctggttagctatcaggatgaccctctgaccaaaggggtggacctacgcaacgcccaggtcacagagttgctacagcgtctgctccacagagcctttgtggtagaaacccagccctgcatgccccaaactccccatcgacccctcatcctcaagactggcagcaagttcaccgtccgaacaaggctgctggtgagactccaggaaggcaatgagtcactgactgtggaagtctccattgacaggaatcctcctcaattacaaggcttccggaagttcaacattctgacttcaaaccagaaaactttgacccccgagaaggggcagagtcagggtttgatttgggactttggttacctgactctggtggagcaacgttcaggtggttcaggaaagggcagcaataaggggccactaggtgtgacagaggaactgcacatcatcagcttcacggtcaaatatacctaccagggtctgaagcaggagctgaaaacggacaccctccctgtggtgattatttccaacatgaaccagctctcaattgcctgggcttcagttctctggttcaatttgctcagcccaaaccttcagaaccagcagttcttctccaacccccccaaggccccctggagcttgctgggccctgctctcagttggcagttctcctcctatgttggccgaggcctcaactcagaccagctgagcatgctgagaaacaagctgttcgggcagaactgtaggactgaggatccattattgtcctgggctgacttcactaagcgagagagccctcctggcaagttaccattctggacatggctggacaaaattctggagttggtacatgaccacctgaaggatctctggaatgatggacgcatcatgggctttgtgagtcggagccaggagcgccggctgctgaagaagaccatgtctggcacctttctactgcgcttcagtgaatcgtcagaagggggcattacctgctcctgggtggagcaccaggatgatgacaaggtgctcatctactctgtgcaaccgtacacgaaggaggtgctgcagtcactcccgctgactgaaatcatccgccattaccagttgctcactgaggagaatatacctgaaaacccactgcgcttcctctatccccgaatcccccgggatgaagcttttgggtgctactaccaggagaaagttaatctccaggaacggaggaaatacctgaaacacaggctcattgtggtctctaatagacaggtggatgaactgcaacaaccgctggagcttaagccagagccagagctggagtcattagagctggaactagggctggtgccagagccagagctcagcctggacttagagccactgctgaaggcagggctggatctggggccagagctagagtctgtgctggagtccactctggagcctgtgatagagcccacactatgcatggtatcacaaacagtgccagagccagaccaaggacctgtatcacagccagtgccagagccagatttgccctgtgatctgagacatttgaacactgagccaatggaaatcttcagaaactgtgtaaagattgaagaaatcatgccgaatggtgacccactgttggctggccagaacaccgtggatgaggtttacgtctcccgccccagccacttctacactgatggacccttgatgccttctgacttctaggaaccacatttcctctgttcttttcatatctctttgcccttcctactcctcatagcatgatattgttctccaaggatgggaatcaggcatgtgtcccttccaagctgtgttaactgttcaaactcaggcctgtgtgactccattggggtgagaggtgaaagcataacatgggtacagaggggacaacaatgaatcagaacagatgctgagccataggtctaaataggatcctggaggctgcctgctgtgctgggaggtataggggtcctgggggcaggccagggcagttgacaggtacttggagggctcagggcagtggcttctttccagtatggaaggatttcaacattttaatagttggttaggctaaactggtgcatactggcattggccttggtggggagcacagacacaggataggactccatttctttcttccattccttcatgtctaggataacttgctttcttctttcctttactcctggctcaagccctgaatttcttcttttcctgcaggggttgagagctttctgccttagcctaccatgtgaaactctaccctgaagaaagggatggataggaagtagacctctttttcttaccagtctcctcccctactctgccccctaagctggctgtacctgttcctcccccataaaatgatcctgccaatctaaaaaaaaaa

SEQ ID NO: 393 - protein, 915 aa, Homo sapiens
MAASVGVAAGNGGRSGLPLPTTRGRVRGGLAEVVGGARGSSTRAHTRDGKSRPEPLEGAGTATLIRAQMAQWEMLQNLDSPFQDQLHQLYSHSLLPVDIRQYLAVWIEDQNWQEAALGSDDSKATMLFFHFLDQLNYECGRCSQDPESLLLQHNLRKFCRDIQDPTQLAEMIFNLLLEEKRILIQAQRAQLEQGEPVLETPVESQQHEIESRILDLRAMMEKLVKSISQLKDQQDVFCFRYKIQAKGKTPSLDPHQTKEQKILQETLNELDKRRKEVLDASKALLGRLTTLIELLLPKLEEWKAQQQKACIRAPIDHGLEQLETWFTAGAKLLFHLRQLLKELKGLSCLVSYQDDPLTKGVDLRNAQVTELLQRLLHRAFVVETQPCMPQTPHRPLILKTGSKFTVRTRLLVRLQEGNESLTVEVSIDRNPPQLQGFRKFNILTSNQKTLTPEKGQSQGLIWDFGYLTLVEQRSGGSGKGSNKGPLGVTEELHIISFTVKYTYQGLKQELKTDTLPVVIISNMNQLSIAWASVLWFNLLSPNLQNQQFFSNPPKAPWSLLGPALSWQFSSYVGRGLNSDQLSMLRNKLFGQNCRTEDPLLSWADFTKRESPPGKLPFWTWLDKILELVHDHLKDLWNDGRIMGFVSRSQERRLLKKTMSGTFLLRFSESSEGGITCSWVEHQDDDKVLIYSVQPYTKEVLQSLPLTEIIRHYQLLTEENIPENPLRFLYPRIPRDEAFGCYYQEKVNLQERRKYLKHRLIVVSNRQVDELQQPLELKPEPELESLELELGLVPEPELSLDLEPLLKAGLDLGPELESVLESTLEPVIEPTLCMVSQTVPEPDQGPVSQPVPEPDLPCDLRHLNTEPMEIFRNCVKIEEIMPNGDPLLAGQNTVDEVYVSRPSHFYTDGPLMPSDF

SEQ ID NO: 394 - DNA, 3458 bp, Homo sapiens
gcttgactgaatggcagccagtgtcggggtggcggctgggaatgggggccgctccggacttccgctgccaactacaagggggcgggtccgaggggggttagccgaagttgtaggcggggcgcgaggttctagtacccgagctcatactagggacgggaagtcgcgaccagagccattggagggcgcggggactgcaaccctaatcagagcccaaatggcgcagtgggaaatgctgcagaatcttgacagcccctttcaggatcagctgcaccagctttactcgcacagcctcctgcctgtggacattcgacagtacttggctgtctggattgaagaccagaactggcaggaagctgcacttgggagtgatgattccaaggctaccatgctattcttccacttcttggatcagctgaactatgagtgtggccgttgcagccaggacccagagtccttgttgctgcagcacaatttgcggaaattctgccgggacattcagcccttttcccaggatcctacccagttggctgagatgatctttaacctccttctggaagaaaaaagaattttgatccaggctcagagggcccaattggaacaaggagagccagttctcgaaacacctgtggagagccagcaacatgagattgaatcccggatcctggatttaagggctatgatggagaagctggtaaaatccatcagccaactgaaagaccagcaggatgtcttctgcttccgatataagatccaggccaaagggaagacaccctctctggacccccatcagaccaaagagcagaagattctgcaggaaactctcaatgaactggacaaaaggagaaaggaggtgctggatgcctccaaagcactgctaggccgattaactaccctaatcgagctactgctgccaaagttggaggagtggaaggcccagcagcaaaaagcctgcatcagagctcccattgaccacgggttggaacagctggagacatggttcacagctggagcaaagctgttgtttcacctgaggcagctgctgaaggagctgaagggactgagttgcctggttagctatcaggatgaccctctgaccaaaggggtggacctacgcaacgcccaggtcacagagttgctacagcgtctgctccacagagcctttgtggtagaaacccagccctgcatgccccaaactccccatcgacccctcatcctcaagactggcagcaagttcaccgtccgaacaaggctgctggtgagactccaggaaggcaatgagtcactgactgtggaagtctccattgacaggaatcctcctcaattacaaggcttccggaagttcaacattctgacttcaaaccagaaaactttgacccccgagaaggggcagagtcagggtttgatttgggactttggttacctgactctggtggagcaacgttcaggtggttcaggaaagggcagcaataaggggccactaggtgtgacagaggaactgcacatcatcagcttcacggtcaaatatacctaccagggtctgaagcaggagctgaaaacggacaccctccctgtggtgattatttccaacatgaaccagctctcaattgcctgggcttcagttctctggttcaatttgctcagcccaaaccttcagaaccagcagttcttctccaacccccccaaggccccctggagcttgctgggccctgctctcagttggcagttctcctcctatgttggccgaggcctcaactcagaccagctgagcatgctgagaaacaagctgttcgggcagaactgtaggactgaggatccattattgtcctgggctgacttcactaagcgagagagccctcctggcaagttaccattctggacatggctggacaaaattctggagttggtacatgaccacctgaaggatctctggaatgatggacgcatcatgggctttgtgagtcggagccaggagcgccggctgctgaagaagaccatgtctggcacctttctactgcgcttcagtgaatcgtcagaagggggcattacctgctcctgggtggagcaccaggatgatgacaaggtgctcatctactctgtgcaaccgtacacgaaggaggtgctgcagtcactcccgctgactgaaatcatccgccattaccagttgctcactgaggagaatatacctgaaaacccactgcgcttcctctatccccgaatcccccgggatgaagcttttgggtgctactaccaggagaaagttaatctccaggaacggaggaaatacctgaaacacaggctcattgtggtctctaatagacaggtggatgaactgcaacaaccgctggagcttaagccagagccagagctggagtcattagagctggaactagggctggtgccagagccagagctcagcctggacttagagccactgctgaaggcagggctggatctggggccagagctagagtctgtgctggagtccactctggagcctgtgatagagcccacactatgcatggtatcacaaacagtgccagagccagaccaaggacctgtatcacagccagtgccagagccagatttgccctgtgatctgagacatttgaacactgagccaatggaaatcttcagaaactgtgtaaagattgaagaaatcatgccgaatggtgacccactgttggctggccagaacaccgtggatgaggtttacgtctcccgccccagccacttctacactgatggacccttgatgccttctgacttctaggaaccacatttcctctgttcttttcatatctctttgcccttcctactcctcatagcatgatattgttctccaaggatgggaatcaggcatgtgtcccttccaagctgtgttaactgttcaaactcaggcctgtgtgactccattggggtgagaggtgaaagcataacatgggtacagaggggacaacaatgaatcagaacagatgctgagccataggtctaaataggatcctggaggctgcctgctgtgctgggaggtataggggtcctgggggcaggccagggcagttgacaggtacttggagggctcagggcagtggcttctttccagtatggaaggatttcaacattttaatagttggttaggctaaactggtgcatactggcattggccttggtggggagcacagacacaggataggactccatttctttcttccattccttcatgtctaggataacttgctttcttctttcctttactcctggctcaagccctgaatttcttcttttcctgcaggggttgagagctttctgccttagcctaccatgtgaaactctaccctgaagaaagggatggataggaagtagacctctttttcttaccagtctcctcccctactctgccccctaagctggctgtacctgttcctcccccataaaatgatcctgccaatctaaaaaaaaaa

SEQ ID NO: 395 - protein, 919 aa, Homo sapiens
MAASVGVAAGNGGRSGLPLPTTRGRVRGGLAEVVGGARGSSTRAHTRDGKSRPEPLEGAGTATLIRAQMAQWEMLQNLDSPFQDQLHQLYSHSLLPVDIRQYLAVWIEDQNWQEAALGSDDSKATMLFFHFLDQLNYECGRCSQDPESLLLQHNLRKFCRDIQPFSQDPTQLAEMIFNLLLEEKRILIQAQRAQLEQGEPVLETPVESQQHEIESRILDLRAMMEKLVKSISQLKDQQDVFCFRYKIQAKGKTPSLDPHQTKEQKILQETLNELDKRRKEVLDASKALLGRLTTLIELLLPKLEEWKAQQQKACIRAPIDHGLEQLETWFTAGAKLLFHLRQLLKELKGLSCLVSYQDDPLTKGVDLRNAQVTELLQRLLHRAFVVETQPCMPQTPHRPLILKTGSKFTVRTRLLVRLQEGNESLTVEVSIDRNPPQLQGFRKFNILTSNQKTLTPEKGQSQGLIWDFGYLTLVEQRSGGSGKGSNKGPLGVTEELHIISFTVKYTYQGLKQELKTDTLPVVIISNMNQLSIAWASVLWFNLLSPNLQNQQFFSNPPKAPWSLLGPALSWQFSSYVGRGLNSDQLSMLRNKLFGQNCRTEDPLLSWADFTKRESPPGKLPFWTWLDKILELVHDHLKDLWNDGRIMGFVSRSQERRLLKKTMSGTFLLRFSESSEGGITCSWVEHQDDDKVLIYSVQPYTKEVLQSLPLTEIIRHYQLLTEENIPENPLRFLYPRIPRDEAFGCYYQEKVNLQERRKYLKHRLIVVSNRQVDELQQPLELKPEPELESLELELGLVPEPELSLDLEPLLKAGLDLGPELESVLESTLEPVIEPTLCMVSQTVPEPDQGPVSQPVPEPDLPCDLRHLNTEPMEIFRNCVKIEEIMPNGDPLLAGQNTVDEVYVSRPSHFYTDGPLMPSDF

SEQ ID NO: 396 - DNA, 1195 bp, Homo sapiens
ccgagactcacggtcaagctaaggcgaagagtgggtggctgaagccatactattttatagaattaatggaaagcagaaaagacatcacaaaccaagaagaactttggaaaatgaagcctaggagaaatttagaagaagacgattatttgcataaggacacgggagagaccagcatgctaaaaagacctgtgcttttgcatttgcaccaaacagcccatgctgatgaatttgactgcccttcagaacttcagcacacacaggaactctttccacagtggcacttgccaattaaaatagctgctattatagcatctctgacttttctttacactcttctgagggaagtaattcaccctttagcaacttcccatcaacaatatttttataaaattccaatcctggtcatcaacaaagtcttgccaatggtttccatcactctcttggcattggtttacctgccaggtgtgatagcagcaattgtccaacttcataatggaaccaagtataagaagtttccacattggttggataagtggatgttaacaagaaagcagtttgggcttctcagtttcttttttgctgtactgcatgcaatttatagtctgtcttacccaatgaggcgatcctacagatacaagttgctaaactgggcatatcaacaggtccaacaaaataaagaagatgcctggattgagcatgatgtttggagaatggagatttatgtgtctctgggaattgtgggattggcaatactggctctgttggctgtgacatctattccatctgtgagtgactctttgacatggagagaatttcactatattcagagcaagctaggaattgtttcccttctactgggcacaatacacgcattgatttttgcctggaataagtggatagatataaaacaatttgtatggtatacacctccaacttttatgatagctgttttccttccaattgttgtcctgatatttaaaagcatactattcctgccatgcttgaggaagaagatactgaagattagacatggttgggaagacgtcaccaaaattaacaaaactgagatatgttcccagttgtagaattactgtttacacacatttttgttcaatattgatatattttatcaccaacatttcaagtttgtatttgttaataaaatgattattcaaggaaaaaaaaaaaaaaaaaa

SEQ ID NO: 397 - protein, 339 aa, Homo sapiens
MESRKDITNQEELWKMKPRRNLEEDDYLHKDTGETSMLKRPVLLHLHQTAHADEFDCPSELQHTQELFPQWHLPIKIAAIIASLTFLYTLLREVIHPLATSHQQYFYKIPILVINKVLPMVSITLLALVYLPGVIAAIVQLHNGTKYKKFPHWLDKWMLTRKQFGLLSFFFAVLHAIYSLSYPMRRSYRYKLLNWAYQQVQQNKEDAWIEHDVWRMEIYVSLGIVGLAILALLAVTSIPSVSDSLTWREFHYIQSKLGIVSLLLGTIHALIFAWNKWIDIKQFVWYTPPTFMIAVFLPIVVLIFKSILFLPCLRKKILKIRHGWEDVTKINKTEICSQL

SEQ ID NO: 398 - DNA, 1436 bp, Homo sapiens
agtgtggtcaggcggctcggactgagcaggactttccttatcccagttgattgtgcagaatacactgcctatcgcttgtcttctattcaccatggcttcttctgatatccaggtgaaagaactggagaagcgtgcctcaggccaggcttttgagctgattctcagccctcggtcaaaagaatctgttccagaattccccctttcccctccaaagaagaaggatctttccctggaggaaattcagaagaaattagaagctgcagaagaaagacgcaagtcccatgaagctgaggtcttgaagcagctggctgagaaacgagagcacgagaaagaagtgcttcagaaggcaatagaagagaacaacaacttcagtaaaatggcagaagagaaactgacccacaaaatggaagctaataaagagaaccgagaggcacaaatggctgccaaactggaacgtttgcgagagaaggataagcacattgaagaagtgcggaagaacaaagaatccaaagaccctgctgacgagactgaagctgactaatttgttctgagaactgactttctccccatccccttcctaaatatccaaagactgtactggccagtgtcattttattttttccctcctgacaaatattttagaagctaatgtaggactgtataggtagatccagatccagactgtaagatgttgttttaggggctaaaggggagaaactgaaagtgttttactctttttctaaagtgttggtctttctaatgtagctatttttcttgttgcatcttttctacttcagtacacttggtgtactgggttaatggctagtactgtattggctctgtgaaaacatatttgtgaaaagagtatgtagtggcttcttttgaactgttagatgctgaatatctgttcacttttcaatcccaattctgtcccaatcttaccagatgctactggacttgaatggttaataaaactgcacagtgctgttggtggcagtgacttcttttgagttaggttaataaatcaagccatagagcccctcctggttgatacttgttccagatggggcctttggggctggtagaaatacccaacgcacaaatgaccgcacgttctctgccccgtttcttgccccagtgtggtttgcattgtctccttccacaatgactgctttgtttggatgcctcagcccaggtcagctgttactttctttcagatgtttatttgcaaacaaccattttttgttctgtgtcccttttaaaaggcagattaaaagcacaagcgtgtttctagagaacagttgagagagaatctcaagattctacttggtggtttgcttgctctacgttacaggtggggcatgtcctcatcctttcctgccataaaagctatgacacgagaatcagaatattaataaaactttatgtactgctgt

SEQ ID NO: 399 - protein, 149 aa, Homo sapiens
MASSDIQVKELEKRASGQAFELILSPRSKESVPEFPLSPPKKKDLSLEEIQKKLEAAEERRKSHEAEVLKQLAEKREHEKEVLQKAIEENNNFSKMAEEKLTHKMEANKENREAQMAAKLERLREKDKHIEEVRKNKESKDPADETEAD

SEQ ID NO: 400 - DNA, 9013 bp, Homo sapiens
gaccctttcctgaggtccagcaagataatccagatctccagtggcagagagttgagagtgatccaggaaagtgaagcaggagatgcgggactgccccgggtggaagtgatcctcgactgctctgacaggcagaagacagaagggtgcaggcttcaggcaggaaaggagtgtgtggattctccagtggaaggagggcagtcagaagcacctccttctctggtatcctttgccgtctcatcagaaggcacagagcagggagaagatccacgctcggaaaaagatcacagcagacctcacaagcaccgagcgcggcatgcacggctcaggaggagtgaaagcctgtcagaaaaacaagtgaaggaagcaaaatctaaatgcaaaagcattgcccttcttctaacggatgctcccaaccccaactccaagggggtgttgatgtttaagaagcgacgtcggagggccaggaaatacaccctagttagctacggtactggcgagcttgagcgagaggcggacgaggaggaagaaggtgacaaggaggatacatgtgaagtagcatttcttggtgcaagcgaatcagaggtggatgaagagttattgtctgacgttgacgacaacacacaagttgtgaactttgactgggattctggactggtggacattgaaaagaaactgaacagaggggacaagatggagatgttaccagacaccacaggcaagggagccctcatgtttgccaagaggagggagagaatggatcagatcacagcccaaaaagaagaggacaaggtaggtggaacgccaagcagagaacaagatgctgcccagaccgatggcctgagaaccacgacttcttaccaaagaaaggaggaagagtcggtaagaacgcagagctctgtgagcaaaagctacatcgaggtgagtcatggtcttggccatgttccccaacagaatggcttcagtgggacatctgagacagcaaacatccagaggatggtccccatgaatagaacggccaaacccttcccagggtctgtgaatcagccagctacccccttctcgccaacccgaaacatgacgagtcccattgctgactttcctgcacctccaccttactctgcagtcactcctccccctgacgccttctccagaggggtttcaagtccgattgctggcccagcacagccccctccatggccccagcctgccccgtggtcccagccagccttttacgattcgtctgagcgaatagcttcccgagatgagaggatctcagtgccagcaaaaagaacaggaatattgcaggaggccaaaaggagaagcacgacaaaacccatgtttacttttaaagagcccaaagtaagcccaaatcctgaactcttgtcactccttcaaaattcagaaggcaaacggggcactggagctggaggtgattccggaccggaagaagactacctcagcttgggggcagaggcttgtaatttcatgcaaagctcctctgccaaacaaaagacccctcctcctgttgctccaaaacctgcagtcaagtcctcatcctcccaaccagtaactccagtttccccagtctggtctccaggagtggctcccacccaacctcctgccttccccacatccaacccatcaaagggcaccgttgtctcctccatcaaaatagcccagccttcttaccctcctgcccggcctgcaagtactttgaacgtggctggtcccttcaaaggaccacaagcagcagtagccagtcagaattacacacccaaaccaacagtttccacaccaacagtcaatgctgttcagcctggtgcagtgggaccatccaatgagcttccaggaatgagtgggagaggagctcagctctttgctaaaaggcagtcgagaatggagaagtatgtggtcgattcagacacggtgcaggcccacgctgctcgagctcagtctcccactccatctctcccggccagttggaagtactcctccaatgtccgagcacctcctcctgtggcctataatcctatccactcgccgtcttacccactggctgctctcaagtctcagccatcagctgcacagccctccaaaatgggcaagaaaaagggaaagaaacccctcaatgcattagatgtcatgaagcaccaaccgtatcagctcaatgcatccttgtttactttccaacctccagatgcaaaggatggcctcccccagaagtcatcagtcaaggtcaattcagccctggccatgaagcaagctcttcctccccggccagtgaatgctgcctcacctacgaatgtgcaggcttcgtcagtgtactcggtaccagcctatacctctcctccttccttctttgcagaggcctcctcaccagtcagtgcatccccagtgcctgtgggcattcccacctcgccaaagcaagaatcagcctcatcatcttattttgtggcaccaaggccaaagttctcagccaagaaaagtggtgtcacaattcaggtgtggaaaccatctgttgtggaagagtaatcttgtagctgaagctgagtgtccactttgcttgaaatgaattgtttgcagtgtttcttgagtccctgagaatgcctagcaaagtcctcaacttacttaatttcagatatgtcacctcctaatctgggtccaaggagtataatatttttaatgagtcaaaaatccaactcagattgacctaaaatatatttatcttctttgcacacttaaaaaatccaggagcaccccaaaatagacatgtaccgttatattaagtaagcaggagacttaggatttgtgctgtagccacaagaaagacagtgatcagtgatatcaaacatcaggaatcagcctttatgtaacataacagctgtcctcctatggtgaaaggttcaaatgtagtgaaggtataacctatattgactgagatttcccttttaggtagtgccttatctctattactagtgttaaaggaataaggaatctatgaaggacagggagcagctctggtctgtcaatctcagccacctgtttgatatcacagagaagatactcggaggattgttggaatgtatatagtttagtaagaagtgggtaagaaagagggtcttaattactgagcacttattatgtattaggttctttgccagatgtttttacatatataaactcatttcagaaaacttatttaaagtaaatggggccgggtatggtggttcatgcctggaatcctagcactttgggaggctgaggtaggaggactgcttgaggccgggagttggagaccagcctgagcaacatagtgagaccctgtctcaataataataataataataataataagtaataatgaagtaaatgggataaggaaagaaggataattatctttaaaggttgattcccaccctccctccccagttacttaaggaactaagtgagtacatctccagttgcccatgaaagcataagtttgttttcctcagctgaggcaagtggtagagtatacaggataacgaagtaacatgtaaaaggcaggacgcacataaaggtgtacatggctattgtttcacctggagaaaccacatgattgggacctgaaggtttactgactgactacaggggctgattgtgaagcacgaggaaccccatgtgtgtggagactgtagggtgagagcacacaattattagcatcatttctgagtgatctcacagattttttttcttgtgtttgttttgctttttgacaactgcttctcccacgttccttgcaattctattctctcaccttcactttactatttgtattcgatggaccaggataattcaggcaaggttaccttgtaaacttgaattggccacacaccatgttgtcacccagctggctatgaagtgaataatggtactgaaagtaaacctgaagacctttctcagatctattttaagtctgagtctgaccaaccatggaaaatattcgacatgaattaatgtagagaactataaagcatttatgacagctccaagaaaaatcatctactctatgcaggagatatgtttagagacctctcagaaaaacttgcctggtttgagggtacacagtaccattttaatcttctgaaaatatctgtattcctgctctttttctgctgtcactgtcaatctgctatatttttcactatcctattaaaatattactgtctcctttatctgttcaatgtccatattttaaaaaaatcttccttgtatgagctattctgatccaaataatttctctgatatttctctatatggctcccacaacaatttcattgttgttagcatatctatttctccatacattgtaaaactgtaatccttaggtatttctaaaacataaagaggagaattaagtcagctgcagaacaatggggctgattcttctgctttttctctggaaaatctttcattgcttttggtggaaatttacctagaggttacaaccacaggatgtagcttggtctcttatttgcctttttgggaaaccaattaagattaatacaggataaaggaaaaaagcaatctattcattatataacacagttgtttgtattacttgttccctgcaaaggaaatctgttgaatgcttgcattttgaattcttttctaatagaacaaccaaaaaaggcttcttatggtgcagcaggaaaaaagatcatttttatagctttgcattcttaacatagcatttaaagagcggcatgaattagaggaaagacatggaacacacaggtagtcggtttgagatcatcggcttaaaagtatcctaggatggtaatgacccagaagtatttccagttgtctagtggtgtggtatgcaggaatgagaagtgttttctttccatttcctgttggacaggtggcaatcttagcagagccactatttggagttgataactaaagatgcaaataacgtgactatgccttctggtcatcctacgactatttggagttctccaaaaccttgtaagaggcatgtcaggcatgcagtaaaagcatctacaacttcagctgggcactggcagcataggtctcatcttggaccatacagtcccactttatagaagagagtggaagttctccaaaacaatatccacaacaaagtctgacctcactctgagggagatgggaagtgggaggaagaaggactaaccagctccctggagtaagaggaatttgctttccctgtctgcccaccaggggctatatgtgccacctttcaggttggggccaaggaagtgatgtcagtgtgacagaagggagagttagacctccagacgtcagcctccctcccatggggtacattttcaatctgagtgttgttgccttagctgtgttggtattagcttgattggttggtccgctggttatgaggtgtagggaggcagtttttgtttagtttttaggactttgcctcttcctttgtccttagcataatttctaggcagagcatccacgaagtcggttttcattgccagctcaagagcgacaatcatttacgagttcctatgttatgttaggtgccttatgtatattatcccaaatccactgcatggtttaaatacaggcactggaatataaatgaaaaaggtcattacagtcactgactttctgcaggaccttaaacatttctctttccacaagtttccccttaatcatgtgtcaaacctctcttcctgacgggaatgttgtgctataatgaatctgcataacgcttgggattctaggaggaaggaaggttccatggacatgtaagtacagcatattcccctcagtcttctaggagggcagagtgaatcccagaactggtaagattgggaatctgagcattgccactttaatcttagaatatttatcattttgacacatcctgttttttagagaggaaaacaaacacagtttctgcattggtagtgtaaagcataccttgttaggaacgtgttttgtaagacacatttgggttgtcattctagagcatgtcaaactttgtacttcaaaatatatttagtatgattgttagtggtaacatatatcaaggctttgaattaactgttttatttaattttcacaagaagcacttattttagccataggaaaaccaatctgagctacaaatagttctttaaaataagcccaggttatttagctattctagaaagtgccgacttctttcaagaagcaggcattgtaggacagctgagaattatcacatagcctaaattctagcctggcagcaagagtcacatctgagatgtccaaaaaaaaaaaaaaaaaacacctgatctacattgaaagggggtagactaacgtatgtgagaccattttcctatttgcagttacaaggttaaagaactttgaaggtcattcggctgctaagaggcatgtcgaacactctgtgtggctctttcacagtaaaccctcctaagagcagaagacacatggctgttagtgtctgcgtttagatttaatttctcaaataaaggcccttggctgcgtatcatttcatccagttataaactagggctcctgcaagcacccccattctaagggtgaattattgaaatcagttgctatttgatgagtcacaactggcccagcaggcagggcatttgaagtcatggtcatcaaaaagaaatgattgttttttgaaaagctaaatgcttaaaatgcttctagagggaagtcgtggggcgtgtgctcattctctttaaaatcagggttgttgagtttgtttttaaacatttttataagttcatgagaaaaaatatataaattctaagaaccaacactgtattcccagaaacatgaccctcgctggtcttgggtccacatatcattggactctgggggacacaaagatgcctgtgacactttggtgttgccgagttagtcaacaattattctgggaaaaagcagaattgaattcttctctagatgtcctaccagggttggccaagggccacaaagcaggctaataaattcccacaggatccagacaccaggcaaaattgctctaagaagccagttactgtcatccctctatggttctagaaaaaatagtacaaaaatgacaggtcatcctatgagcgtcatgccaatgaaaccccatcttctggagaagcccttgaatcagaattatcttttttcttgatgtcgtcagatgcagccagtttcttaatttttttaaaaactgtatgtttctgtggtatgtatatttgtacacctaactacctggcacttggaaatcacagcactactcagaggcaatgaataaagagaaatttaattttaaatatcaagtcctgtcaaacatttctcaaacttctgattttatcaaaggtttgccagccaataaagtgcatcccaagtatacaggggagaaagctagactcctacagggtcctagagtttaagtaatttttttgttattaatataggtaataatttttctaatttttattttttggtcccaaatgtaaagctccttgtgtttacctctgtttatgtccattcttgacatgtttatctaaattatgtgtgctctgtgacaggtgaaatgtaaatctgggatccatagtcaagatatcataaggacctacttcccagcctacctttcttcctctacctgataatgataatactcaaaataacaacattcaaaggaaacacaaagaaatcctgctttcacatctcctatttcttgggctccttaataactactgatggtttgttcatgaaaaaaaatttttaaatcaaaagattgtacttggccctgagttgaaaaaatttcaaaaatcaaaagtttgtacttggccctgagttgaaaaaaaaaattcacattctaagaataaacagaaaaatgttcttcttggaagtaaataacaaaagccatagtgttttcatttgtcttttcttcaggatacacggtagaagtcagagaatctttgatacttttatttggtgcaataatcaaggccatgcaacaacccaaaatcaagcattttggttcaagtcaggatgacatgagtggggacagaagctgtggcagtcattcaaataatctcatgggtcctgaggaaaagacaggagttaatgtattaagtttctactatatgcaggaactgtgttaaatattttacataagttttgataatagctaacattagctgagcacaaaatttgggccctgatttgtgctgagtatctttcacagattactgcttttaatcagcagtccttgtgagctaggtatgatcattatccccattttatagattacagatgagattctgaggcacaaagaggctaagtaacttgccaaagatcatacgatgttaagtaatggcccctggattcagtctgcagcctgaattcttaaccaattatactgtgatttcattattcttcagaattacactaaaaagaaggtattattcccattttacagatgaggtatctaagctcagagaagctaaacaacttgtgcaacaatcactaagcttataagcagtggattagggttagatttagatatttgtctggcatccaaacctgtgctctccctacagtaccacatggtttccacagtctcatcagaccccggaatttcactccctgagactgcttaattgtgaatttcccaaactgattcaccaagagcctactgtctctgctttgtagatagctttgaccacattcaatgacattaggaaagactccatttcccaagatggctcagaaaatcagatgctatgacgcatgttgaaagtgaaaacccatctctgagaaagaagcatctgttttattagtaaaaaaaaaaaatgaaatttacagcaatgttgtgtgacttctcaaaattctttcattttcttatttcagaatgaatagtgttgttcgttggctgggaatggggaagaatgtgatttttaaaaataaagcataatcaaactctgcaaaaaaaaaaaaaaaa

SEQ ID NO: 401 - protein, 843 aa, Homo sapiens
DPFLRSSKIIQISSGRELRVIQESEAGDAGLPRVEVILDCSDRQKTEGCRLQAGKECVDSPVEGGQSEAPPSLVSFAVSSEGTEQGEDPRSEKDHSRPHKHRARHARLRRSESLSEKQVKEAKSKCKSIALLLTDAPNPNSKGVLMFKKRRRRARKYTLVSYGTGELEREADEEEEGDKEDTCEVAFLGASESEVDEELLSDVDDNTQVVNFDWDSGLVDIEKKLNRGDKMEMLPDTTGKGALMFAKRRERMDQITAQKEEDKVGGTPSREQDAAQTDGLRTTTSYQRKEEESVRTQSSVSKSYIEVSHGLGHVPQQNGFSGTSETANIQRMVPMNRTAKPFPGSVNQPATPFSPTRNMTSPIADFPAPPPYSAVTPPPDAFSRGVSSPIAGPAQPPPWPQPAPWSQPAFYDSSERIASRDERISVPAKRTGILQEAKRRSTTKPMFTFKEPKVSPNPELLSLLQNSEGKRGTGAGGDSGPEEDYLSLGAEACNFMQSSSAKQKTPPPVAPKPAVKSSSSQPVTPVSPVWSPGVAPTQPPAFPTSNPSKGTVVSSIKIAQPSYPPARPASTLNVAGPFKGPQAAVASQNYTPKPTVSTPTVNAVQPGAVGPSNELPGMSGRGAQLFAKRQSRMEKYVVDSDTVQAHAARAQSPTPSLPASWKYSSNVRAPPPVAYNPIHSPSYPLAALKSQPSAAQPSKMGKKKGKKPLNALDVMKHQPYQLNASLFTFQPPDAKDGLPQKSSVKVNSALAMKQALPPRPVNAASPTNVQASSVYSVPAYTSPPSFFAEASSPVSASPVPVGIPTSPKQESASSSYFVAPRPKFSAKKSGVTIQVWKPSVVEE

SEQ ID NO: 402 - DNA, 1528 bp, Homo sapiens
cggcgagcgagcaccttcgacgcggtccggggaccccctcgtcgctgtcctcccgacgcggacccgcgtgccccaggcctcgcgctgcccggccggctcctcgtgtcccactcccggcgcacgccctcccgcgagtcccgggcccctcccgcgcccctcttctcggcgcgcgcgcagcatggcgcccccgcaggtcctcgcgttcgggcttctgcttgccgcggcgacggcgacttttgccgcagctcaggaagaatgtgtctgtgaaaactacaagctggccgtaaactgctttgtgaataataatcgtcaatgccagtgtacttcagttggtgcacaaaatactgtcatttgctcaaagctggctgccaaatgtttggtgatgaaggcagaaatgaatggctcaaaacttgggagaagagcaaaacctgaaggggccctccagaacaatgatgggctttatgatcctgactgcgatgagagcgggctctttaaggccaagcagtgcaacggcacctccacgtgctggtgtgtgaacactgctggggtcagaagaacagacaaggacactgaaataacctgctctgagcgagtgagaacctactggatcatcattgaactaaaacacaaagcaagagaaaaaccttatgatagtaaaagtttgcggactgcacttcagaaggagatcacaacgcgttatcaactggatccaaaatttatcacgagtattttgtatgagaataatgttatcactattgatctggttcaaaattcttctcaaaaaactcagaatgatgtggacatagctgatgtggcttattattttgaaaaagatgttaaaggtgaatccttgtttcattctaagaaaatggacctgacagtaaatggggaacaactggatctggatcctggtcaaactttaatttattatgttgatgaaaaagcacctgaattctcaatgcagggtctaaaagctggtgttattgctgttattgtggttgtggtgatagcagttgttgctggaattgttgtgctggttatttccagaaagaagagaatggcaaagtatgagaaggctgagataaaggagatgggtgagatgcatagggaactcaatgcataactatataatttgaagattatagaagaagggaaatagcaaatggacacaaattacaaatgtgtgtgcgtgggacgaagacatctttgaaggtcatgagtttgttagtttaacatcatatatttgtaatagtgaaacctgtactcaaaatataagcagcttgaaactggctttaccaatcttgaaatttgaccacaagtgtcttatatatgcagatctaatgtaaaatccagaacttggactccatcgttaaaattatttatgtgtaacattcaaatgtgtgcattaaatatgcttccacagtaaaatctgaaaaactgatttgtgattgaaagctgcctttctatttacttgagtcttgtacatacatacttttttatgagctatgaaataaaacattttaaactg

SEQ ID NO: 403 - protein, 314 aa, Homo sapiens
MAPPQVLAFGLLLAAATATFAAAQEECVCENYKLAVNCFVNNNRQCQCTSVGAQNTVICSKLAAKCLVMKAEMNGSKLGRRAKPEGALQNNDGLYDPDCDESGLFKAKQCNGTSTCWCVNTAGVRRTDKDTEITCSERVRTYWIIIELKHKAREKPYDSKSLRTALQKEITTRYQLDPKFITSILYENNVITIDLVQNSSQKTQNDVDIADVAYYFEKDVKGESLFHSKKMDLTVNGEQLDLDPGQTLIYYVDEKAPEFSMQGLKAGVIAVIVVVVIAVVAGIVVLVISRKKRMAKYEKAEIKEMGEMHRELNA

SEQ ID NO: 404 - DNA, 1027 bp, Homo sapiens
gggcaagagttgggcaaaaaaatcaaggtatttggtcccggaacaaagcttatcattacagataaacaacttgatgcagatgtttcccccaagcccactatttttcttccttcaattgctgaaacaaagctccagaaggctggaacatacctttgtcttcttgagaaatttttccctgatgttattaagatacattggcaagaaaagaagagcaacacgattctgggatcccaggaggggaacaccatgaagactaacgacacatacatgaaatttagctggttaacggtgccagaaaagtcactggacaaagaacacagatgtatcgtcagacatgagaataataaaaacggagttgatcaagaaattatctttcctccaataaagacggatgtcatcacaatggatcccaaagacaattgttcaaaagatgcaaatgatacactactgctgcagctcacaaacacctctgcatattacatgtacctcctcctgctcctcaagagtgtggtctattttgccatcatcacctgctgtctgcttagaagaacggctttctgctgcaatggagagaaatcataacagacggtggcacaaggaggccatcttttcctcatcggttattgtccctagaagcgtcttctgaggatctagttgggctttctttctgggtttgggccatttcagttctcatgtgtgtactattctatcattattgtataacggttttcaaaccagtgggcacacagagaacctcactctgtaataacaatgaggaatagccacggcgatctccagcaccaatctctccatgttttccacagctcctccagccaacccaaatagcgcctgctatagtgtagacatcctgcggcttctagccttgtccctctcttagtgttctttaatcagataactgcctggaagcctttcattttacacgccctgaagcagtcttctttgctagttgaattatgtggtgtgtttttccgtaataagcaaaataaatttaaaaaaatgaaaagtt

SEQ ID NO: 405 - protein, 58 aa, Homo sapiens
MQMFPPSPLFFFLQLLKQSSRRLEHTFVFLRNFSLMLLRYIGKKRRATRFWDPRRGTP

SEQ ID NO: 406 - DNA, 398 bp, Homo sapiens
gatgctggggctggtcctggccttgctgtcctccagctctgctgaggagtacgtgggcctgtctgcaaaccagtgtgccgtgccggccaaggacagggtggactgcggctacccccatgtcacccccaaggagtgcaacaaccggggctgctgctttgactccaggatccctggagtgccttggtgtttcaagcccctgactaggaagacagaatgcaccttctgaggcacctccagctgcccctgggatgcaggctgagcacccttgcccggctgtgattgctgccaggcactgttcatctcagtttttctgtccctttgctcccggcaagctttctgctgaaagttcatatctggagcctgatgtcttaacgaataaaggtcccatgctccacccg

SEQ ID NO: 407 - protein, 74 aa, Homo sapiens
MLGLVLALLSSSSAEEYVGLSANQCAVPAKDRVDCGYPHVTPKECNNRGCCFDSRIPGVPWCFKPLTRKTECTF

SEQ ID NO: 408 - DNA, 1795 bp, Homo sapiens
tcttcctacccatctgctccccagagggctgcctgctgtgcacttgggtcctggagcccttctccacccggatagattcctcacccttggcccgcctttgccccaccctactctgcccagaagtgcaagagcctaagccgcctccatggccccaggaaggattcaggggagaggccccaaacagggagccacgccagccagacaccccggccagaatggagctgactgaattgctcctcgtggtcatgcttctcctaactgcaaggctaacgctgtccagcccggctcctcctgcttgtgacctccgagtcctcagtaaactgcttcgtgactcccatgtccttcacagcagactgagccagtgcccagaggttcaccctttgcctacacctgtcctgctgcctgctgtggactttagcttgggagaatggaaaacccagatggaggagaccaaggcacaggacattctgggagcagtgacccttctgctggagggagtgatggcagcacggggacaactgggacccacttgcctctcatccctcctggggcagctttctggacaggtccgtctcctccttggggccctgcagagcctccttggaacccagcttcctccacagggcaggaccacagctcacaaggatcccaatgccatcttcctgagcttccaacacctgctccgaggaaaggtgcgtttcctgatgcttgtaggagggtccaccctctgcgtcaggcgggccccacccaccacagctgtccccagcagaacctctctagtcctcacactgaacgagctcccaaacaggacttctggattgttggagacaaacttcactgcctcagccagaactactggctctgggcttctgaagtggcagcagggattcagagccaagattcctggtctgctgaaccaaacctccaggtccctggaccaaatccccggatacctgaacaggatacacgaactcttgaatggaactcgtggactctttcctggaccctcacgcaggaccctaggagccccggacatttcctcaggaacatcagacacaggctccctgccacccaacctccagcctggatattctccttccccaacccatcctcctactggacagtatacgctcttccctcttccacccaccttgcccacccctgtggtccagctccaccccctgcttcctgacccttctgctccaacgcccacccctaccagccctcttctaaacacatcctacacccactcccagaatctgtctcaggaagggtaaggttctcagacactgccgacatcagcattgtctcatgtacagctcccttccctgcagggcgcccctgggagacaactggacaagatttcctactttctcctgaaacccaaagccctggtaaaagggatacacaggactgaaaagggaatcatttttcactgtacattataaaccttcagaagctatttttttaagctatcagcaatactcatcagagcagctagctctttggtctattttctgcagaaatttgcaactcactgattctctacatgctctttttctgtgataactctgcaaaggcctgggctggcctggcagttgaacagagggagagactaaccttgagtcagaaaacagagaaagggtaatttcctttgcttcaaattcaaggccttccaacgcccccatcccctttactatcattctcagtgggactctgatcccatattcttaacagatctttactcttgagaaatgaataagctttctctcagaaaaaaaaaaaaaaaaaaaaa

SEQ ID NO: 409 - protein, 353 aa, Homo sapiens
MELTELLLVVMLLLTARLTLSSPAPPACDLRVLSKLLRDSHVLHSRLSQCPEVHPLPTPVLLPAVDFSLGEWKTQMEETKAQDILGAVTLLLEGVMAARGQLGPTCLSSLLGQLSGQVRLLLGALQSLLGTQLPPQGRTTAHKDPNAIFLSFQHLLRGKVRFLMLVGGSTLCVRRAPPTTAVPSRTSLVLTLNELPNRTSGLLETNFTASARTTGSGLLKWQQGFRAKIPGLLNQTSRSLDQIPGYLNRIHELLNGTRGLFPGPSRRTLGAPDISSGTSDTGSLPPNLQPGYSPSPTHPPTGQYTLFPLPPTLPTPVVQLHPLLPDPSAPTPTPTSPLLNTSYTHSQNLSQEG

SEQ ID NO: 410 - DNA, 1814 bp, Homo sapiens
gcagagctcgagaggcggctgccgggctgcggggcgccttgactctccctccaccctgcctcctcgggctccactcgtctgcccctggactcccgtctcctcctgtcctccggcttcccagagctccctccttatggcagcagcttcccgcgtctccggcgcagcttctcagcggacgaccctctcgctccggggctgagcccagtccctggatgttgctgaaactctcgagatcatgcgcgggtttggctgctgcttccccgccgggtgccactgccaccgccgccgcctctgctgccgccgtccgcgggatgctcagtagcccgctgcccggcccccgcgatcctgtgttcctcggaagccgtttgctgctgcagagttgcacgaactagtcatggtgctgtgggagtccccgcggcagtgcagcagctggacactttgcgagggcttttgctggctgctgctgctgcccgtcatgctactcatcgtagcccgcccggtgaagctcgctgctttccctacctccttaagtgactgccaaacgcccaccggctggaattgctctggttatgatgacagagaaaatgatctcttcctctgtgacaccaacacctgtaaatttgatggggaatgtttaagaattggagacactgtgacttgcgtctgtcagttcaagtgcaacaatgactatgtgcctgtgtgtggctccaatggggagagctaccagaatgagtgttacctgcgacaggctgcatgcaaacagcagagtgagatacttgtggtgtcagaaggatcatgtgccacagatgcaggatcaggatctggagatggagtccatgaaggctctggagaaactagtcaaaaggagacatccacctgtgatatttgccagtttggtgcagaatgtgacgaagatgccgaggatgtctggtgtgtgtgtaatattgactgttctcaaaccaacttcaatcccctctgcgcttctgatgggaaatcttatgataatgcatgccaaatcaaagaagcatcgtgtcagaaacaggagaaaattgaagtcatgtctttgggtcgatgtcaagataacacaactacaactactaagtctgaagatgggcattatgcaagaacagattatgcagagaatgctaacaaattagaagaaagtgccagagaacaccacataccttgtccggaacattacaatggcttctgcatgcatgggaagtgtgagcattctatcaatatgcaggagccatcttgcaggtgtgatgctggttatactggacaacactgtgaaaaaaaggactacagtgttctatacgttgttcccggtcctgtacgatttcagtatgtcttaatcgcagctgtgattggaacaattcagattgctgtcatctgtgtggtggtcctctgcatcacaaggaaatgccccagaagcaacagaattcacagacagaagcaaaatacagggcactacagttcagacaatacaacaagagcgtccacgaggttaatctaaagggagcatgtttcacagtggctggactaccgagagcttggactacacaatacagtattatagacaaaagaataagacaagagatctacacatgttgccttgcatttgtggtaatctacaccaatgaaaacatgtactacagctatatttgattatgtatggatatatttgaaatagtatacattgtcttgatgttttttctgtaatgtaaataaactatttatatcacacaatatagttttttctttcccatgtatttgttatatataataaatactcagtgatgagaaaaaaa

SEQ ID NO: 411 - protein, 374 aa, Homo sapiens
MVLWESPRQCSSWTLCEGFCWLLLLPVMLLIVARPVKLAAFPTSLSDCQTPTGWNCSGYDDRENDLFLCDTNTCKFDGECLRIGDTVTCVCQFKCNNDYVPVCGSNGESYQNECYLRQAACKQQSEILVVSEGSCATDAGSGSGDGVHEGSGETSQKETSTCDICQFGAECDEDAEDVWCVCNIDCSQTNFNPLCASDGKSYDNACQIKEASCQKQEKIEVMSLGRCQDNTTTTTKSEDGHYARTDYAENANKLEESAREHHIPCPEHYNGFCMHGKCEHSINMQEPSCRCDAGYTGQHCEKKDYSVLYVVPGPVRFQYVLIAAVIGTIQIAVICVVVLCITRKCPRSNRIHRQKQNTGHYSSDNTTRASTRLI

SEQ ID NO: 412 - DNA, 1141 bp, Homo sapiens
tccttgggttcgggtgaaagcgcctgggggttcgtggccatgatccccgagctgctggagaactgaaggcggacagtctcctgcgaaaccaggcaatggcggagctggagtttgttcagatcatcatcatcgtggtggtgatgatggtgatggtggtggtgatcacgtgcctgctgagccactacaagctgtctgcacggtccttcatcagccggcacagccaggggcggaggagagaagatgccctgtcctcagaaggatgcctgtggccctcggagagcacagtgtcaggcaacggaatcccagagccgcaggtctacgccccgcctcggcccaccgaccgcctggccgtgccgcccttcgcccagcgggagcgcttccaccgcttccagcccacctatccgtacctgcagcacgagatcgacctgccacccaccatctcgctgtcagacggggaggagcccccaccctaccagggcccctgcaccctccagcttcgggaccccgagcagcagctggaactgaaccgggagtcggtgcgcgcacccccaaacagaaccatcttcgacagtgacctgatggatagtgccaggctgggcggcccctgcccccccagcagtaactcgggcatcagcgccacgtgctacggcagcggcgggcgcatggaggggccgccgcccacctacagcgaggtcatcggccactacccggggtcctccttccagcaccagcagagcagtgggccgccctccttgctggaggggacccggctccaccacacacacatcgcgcccctagagagcgcagccatctggagcaaagagaaggataaacagaaaggacaccctctctagggtccccaggggggccgggctggggctgcgtaggtgaaaaggcagaacactccgcgcttcttagaagaggagtgagaggaaggcggggggcgcagcaacgcatcgtgtggccctcccctcccacctccctgtgtataaatatttacatgtgatgtctggtctgaatgcacaagctaagagagcttgcaaaaaaaaaaagaaaaaagaaaaaaaaaaaccacgtttctttgttgagctgtgtcttgaaggcaaaagaaaaaaaatttctacagtaaaaaaaaaaaaaa

SEQ ID NO: 413 - protein, 252 aa, Homo sapiens
MAELEFVQIIIIVVVMMVMVVVITCLLSHYKLSARSFISRHSQGRRREDALSSEGCLWPSESTVSGNGIPEPQVYAPPRPTDRLAVPPFAQRERFHRFQPTYPYLQHEIDLPPTISLSDGEEPPPYQGPCTLQLRDPEQQLELNRESVRAPPNRTIFDSDLMDSARLGGPCPPSSNSGISATCYGSGGRMEGPPPTYSEVIGHYPGSSFQHQQSSGPPSLLEGTRLHHTHIAPLESAAIWSKEKDKQKGHPL

SEQ ID NO: 414 - DNA, 3226 bp, Homo sapiens
cgcgagctaagcaggaggcggaggcggaggcggagggcgaggggcggggagcgccgcctggagcgcggcaggtcatattgaacattccagatacctatcattactcgatgctgttgataacagcaagatggctttgaactcagggtcaccaccagctattggaccttactatgaaaaccatggataccaaccggaaaacccctatcccgcacagcccactgtggtccccactgtctacgaggtgcatccggctcagtactacccgtcccccgtgccccagtacgccccgagggtcctgacgcaggcttccaaccccgtcgtctgcacgcagcccaaatccccatccgggacagtgtgcacctcaaagactaagaaagcactgtgcatcaccttgaccctggggaccttcctcgtgggagctgcgctggccgctggcctactctggaagttcatgggcagcaagtgctccaactctgggatagagtgcgactcctcaggtacctgcatcaacccctctaactggtgtgatggcgtgtcacactgccccggcggggaggacgagaatcggtgtgttcgcctctacggaccaaacttcatccttcagatgtactcatctcagaggaagtcctggcaccctgtgtgccaagacgactggaacgagaactacgggcgggcggcctgcaaggacatgggctataagaataatttttactctagccaaggaatagtggatgacagcggatccaccagctttatgaaactgaacacaagtgccggcaatgtcgatatctataaaaaactgtaccacagtgatgcctgttcttcaaaagcagtggtttctttacgctgtatagcctgcggggtcaacttgaactcaagccgccagagcaggattgtgggcggtgagagcgcgctcccgggggcctggccctggcaggtcagcctgcacgtccagaacgtccacgtgtgcggaggctccatcatcacccccgagtggatcgtgacagccgcccactgcgtggaaaaacctcttaacaatccatggcattggacggcatttgcggggattttgagacaatctttcatgttctatggagccggataccaagtagaaaaagtgatttctcatccaaattatgactccaagaccaagaacaatgacattgcgctgatgaagctgcagaagcctctgactttcaacgacctagtgaaaccagtgtgtctgcccaacccaggcatgatgctgcagccagaacagctctgctggatttccgggtggggggccaccgaggagaaagggaagacctcagaagtgctgaacgctgccaaggtgcttctcattgagacacagagatgcaacagcagatatgtctatgacaacctgatcacaccagccatgatctgtgccggcttcctgcaggggaacgtcgattcttgccagggtgacagtggagggcctctggtcacttcgaagaacaatatctggtggctgataggggatacaagctggggttctggctgtgccaaagcttacagaccaggagtgtacgggaatgtgatggtattcacggactggatttatcgacaaatgagggcagacggctaatccacatggtcttcgtccttgacgtcgttttacaagaaaacaatggggctggttttgcttccccgtgcatgatttactcttagagatgattcagaggtcacttcatttttattaaacagtgaacttgtctggctttggcactctctgccattctgtgcaggctgcagtggctcccctgcccagcctgctctccctaaccccttgtccgcaaggggtgatggccggctggttgtgggcactggcggtcaagtgtggaggagaggggtggaggctgccccattgagatcttcctgctgagtcctttccaggggccaattttggatgagcatggagctgtcacctctcagctgctggatgacttgagatgaaaaaggagagacatggaaagggagacagccaggtggcacctgcagcggctgccctctggggccacttggtagtgtccccagcctacctctccacaaggggattttgctgatgggttcttagagccttagcagccctggatggtggccagaaataaagggaccagcccttcatgggtggtgacgtggtagtcacttgtaaggggaacagaaacatttttgttcttatggggtgagaatatagacagtgcccttggtgcgagggaagcaattgaaaaggaacttgccctgagcactcctggtgcaggtctccacctgcacattgggtggggctcctgggagggagactcagccttcctcctcatcctccctgaccctgctcctagcaccctggagagtgcacatgccccttggtcctggcagggcgccaagtctggcaccatgttggcctcttcaggcctgctagtcactggaaattgaggtccatgggggaaatcaaggatgctcagtttaaggtacactgtttccatgttatgtttctacacattgctacctcagtgctcctggaaacttagcttttgatgtctccaagtagtccaccttcatttaactctttgaaactgtatcacctttgccaagtaagagtggtggcctatttcagctgctttgacaaaatgactggctcctgacttaacgttctataaatgaatgtgctgaagcaaagtgcccatggtggcggcgaagaagagaaagatgtgttttgttttggactctctgtggtcccttccaatgctgtgggtttccaaccaggggaagggtcccttttgcattgccaagtgccataaccatgagcactactctaccatggttctgcctcctggccaagcaggctggtttgcaagaatgaaatgaatgattctacagctaggacttaaccttgaaatggaaagtcttgcaatcccatttgcaggatccgtctgtgcacatgcctctgtagagagcagcattcccagggaccttggaaacagttggcactgtaaggtgcttgctccccaagacacatcctaaaaggtgttgtaatggtgaaaacgtcttccttctttattgccccttcttatttatgtgaacaactgtttgtctttttttgtatcttttttaaactgtaaagttcaattgtgaaaatgaatatcatgcaaataaattatgcgatttttttttcaaagcaaaaaaaaaaaaaaaaaaaaaaaaaaaaaaa

SEQ ID NO: 415 - protein, 492 aa, Homo sapiens [sequence omitted]

SEQ ID NO: 416 - DNA, 3247 bp, Homo sapiens
gaggagctctgcgcggcgcggcgggcgatccgagccgggacgggctgcaggcgggggtgctgcagaggacacgaggcggcgggctggagacatggaccgcggcgagcaaggtctgctgagaacagacccagtccctgaggaaggagaagatgttgctgccacgatcagtgccacagagaccctctcggaagaggagcaggaagagctaagaagagaacttgcaaaggtagaagaagaaatccagactctgtctcaagtgttagcagcaaaagagaagcatctagcagagatcaagcggaaacttggaatcaattctctacaggaactaaaacagaacattgccaaagggtggcaagacgtgacagcaacatctgcttacaagaagacatctgaaaccttatcccaggctggacagaaggcctcagctgctttttcgtctgttggctcagtcatcaccaaaaagctggaagatgtaaaaaactccccaacttttaaatcatttgaagaaaaggtcgaaaacttaaagtctaaagtagggggaaccaagcctgctggtggtgattttggagaagtcttgaattcggctgcaaatgctagtgccaccaccacggagcctcttccagaaaagacacaggagagcctgtgagattcctacctttgttctgctacccactgccagatgctgcaagcgaggtccaagcacatcttgtcaacatgcattgccatgaatttctaccagatgtgcttttatttagctttacatattcctttgaccaaatagtttgtgggttaaacaaaatgaaaatatcttcacctctattcttgggaaacaccctttagtgtacatttatgttcctttatttaggaaacaccattataaaaacacttatagtaaatggggacattcactataatgatctaagaagctacagattgtcatagttgttttcctgctttacaaaattgctccagatctggaatgccagtttgacctttgtcttctataatatttcctttttttcccctctttgaatctctgtatatttgattcttaactaaaattgttctcttaaatattctgaatcctggtaattaaaagtttgggtgtattttctttacctccaaggaaagaactactagctacaaaaaatattttggaataagcattgttttggtataaggtacatattttggttgaagacaccagactgaagtaaacagctgtgcatccaatttattatagttttgtaagtaacaatatgtaatcaaacttctaggtgacttgagagtggaacctcctatatcattatttagcaccgtttgtgacagtaaccatttcagtgtattgtttattataccacttatatcaacttatttttcaccaggttaaaattttaatttctacaaaataacattctgaatcaagcacactgtatgttcagtaggttgaactatgaacactgtcatcaatgttcagttcaaaagcctgaaagtttagatctagaagctggtaaaaatgacaatatcaatcacattaggggaaccattgttgtcttcacttaatccatttagcactatttaaaataagcacaccaagttatatgactaatataacttgaaaattttttatactgaggggttggtgataactcttgaggatgtaatgcattaataaaaatcaactcatcattttctacttgttttcaatgtgttggaaactgtaaaatgatactgtagaacctgtctcctactttgaaaactgaatgtcagggctgagtgaatcaaagtgtctagacatatttgcatagaggccaaggtattctattctaataactgcttactcaacactaccaccttttccttatactgtatatgattatggcctacaatgttgtatttgttatttattaaattgtgattgttttattattgtttatgccaaatgttaactgccaagcttggagtgacctaaagcattttttaaaagcatggctagatttacttcagtataaattatcttatgaaaaccaaattttaaaagccacaggtgttgattgttataaaataacatgctgccattcttgattgctagagtttttgttagtactttggatgcaattaaaactatgtgctatcacatgtgaaaagcttaataaattccatctatcagtagtataggtctcaatatttattatgagaccagtggtctggaaacagcttgttgtaccgaatcaactggagtctatgcttaaaaaaaaaaatttttttttaaccatccttaaattattgcttaatggtatcatattaacatattctaaataagggctttaaggcacaggctgttgaagcattttctcagaggagtggatctgtagaagtctgtctttctatagaaatattgtgcttactcaagtgttaaattattttttctatgaactagtctacttcttaaaattcaaacatattcttttgatcacattgtttcttgagcatcctgccctgctactaacttttcaacaaggcaaaatggagtaaagtggcaatttctttagatgagtgaaataccctcaagtctcttttctgcccaaaaagggaaaagtgatagaaatgggggtggcaagtggggtgagtggatgaaggtgggtattgggggtggctgtgaaagaaaataatggagaatcacttttctagacatctacctatacttaatctaagaaacaaagtaatctactgtaaagtactctgccccttgaaagaagtattaaaaagagtgaggatggatttagaaaaaaacatgaatttagaaatattcaaaatggtttttgtggcagattcaatattatgaattcacagatatttaaagaatgagaaacatagtaattagtagaaatgccagaaacagttcctggttcctcttgtgtttgacactaagaaaatagcaagagtgtgaaatctcagatacttatgaaatctcacagatgtaaggactcaagtgtagaagaaaatatccccttcttacaaaaagaaatgtcaatttatggagtttgtgggaaatagggcaagaattcttatgcttatgagagccaagtagtcagtggaagagagtagagctcaaaactggattatcaccttagcaacttagaatagtttgaaatagaaaaaaagtatttaatttggatctggatctgttaagatatgcacagtctattttttgtatagtattggaaaataaaaatgctataatttg

SEQ ID NO: 417 - protein, 184 aa, Homo sapiens
MDRGEQGLLRTDPVPEEGEDVAATISATETLSEEEQEELRRELAKVEEEIQTLSQVLAAKEKHLAEIKRKLGINSLQELKQNIAKGWQDVTATSAYKKTSETLSQAGQKASAAFSSVGSVITKKLEDVKNSPTFKSFEEKVENLKSKVGGTKPAGGDFGEVLNSAANASATTTEPLPEKTQESL

SEQ ID NO: 418 - DNA, 6452 bp, Homo sapiens
cgagcgagtgtcatggcggccggcgtcgagttggcaggagtaacccacggaactgaggaaagtcattagagctgagaaagaagtggcccaatctggacggtgggaattcgtgggaatgagcagaaggccctccgtagtgactgtgtcactagaggcgggcccctggtaaaattccaggccaggcctctgcgtttctaggcagaacctggagtcggccttgcctgagaacccagctttgtgttatcgtatcctgtctcgcgaaggcaggcgttcaaggatatttggtcggatcgcccggcggcgctaaacgttttcttttttccgagcggaccgggtcgttctctaaactcgccgcgatgtcgtcctggcttgggggcctcggctccggattgggccagtctctgggtcaagtcgggggcagcctggcttccctcactggccagatatcaaactttacaaaggatatgctgatggagggcacggaggaagtggaagcagaattacctgattctaggacaaaggaaattgaagccattcatgcaatcttgagatcagagaatgaaaggcttaagaaactttgtactgatctagaagagaaacatgaagcatcagagattcaaataaagcagcaatctacaagttaccgaaatcaacttcaacaaaaagaggtagaaatcagccatcttaaagccagacagattgcactccaggatcagttgctgaaactgcagtcagctgctcagtcagtaccttcaggagctggtgtaccagcaaccactgcatcatcttcattcgcttatgggattagtcatcatccttcagctttccatgacgatgacatggactttggtgatataatttcatcccaacaagaaataaaccgactctcaaatgaagtttcaagacttgagtctgaagttggccattggaggcatattgctcagacttccaaagcacaaggaacagataactctgatcaaagtgaaatatgtaaactacaaaatatcattaaggaactaaaacagaaccgaagtcaggaaattgatgaccatcaacatgaaatgtcagtactgcagaatgcacaccaacagaaattgacagaaataagtcgacgacatcgagaagaattaagtgactatgaagaacgaattgaagaacttgaaaatctgttacaacaaggtggctctggagttatagaaactgatctctctaaaatctatgagatgcaaaaaactattcaagttctacaaatagaaaaagtggagtctaccaaaaaaatggaacaacttgaggataaaataaaagatataaataaaaaattatcttctgcagaaaatgacagagatattttgaggagggaacaagaacagctaaatgtggaaaagagacaaataatggaagaatgtgaaaacttgaaattggaatgtagtaaattgcagccttctgctgtgaagcaaagtgatactatgacagaaaaggaaagaattcttgcccagagtgcatcagtggaagaagtgttcagactacaacaagcactgtctgatgccgaaaatgaaataatgagattgagtagtttaaaccaggataacagtcttgctgaagacaatctgaaacttaaaatgcgtatcgaagttttagaaaaagagaagtcattactgagtcaagaaaaggaagaacttcagatgtcacttttaaaattgaacaatgaatatgaagtaattaaaagtacagctacaagagacataagtttggattcagaattacatgacttaagacttaatttggaggcaaaggaacaagaactcaatcagagtattagtgaaaaggaaacactgatagctgagatagaagaattggacagacagaatcaagaagctacaaagcacatgattttgataaaagatcagctatcaaaacaacaaaatgaaggagatagcatcatcagtaaactgaaacaagatctaaatgatgaaaaaaagagagttcatcaacttgaagatgataaaatggacattactaaagagttagatgtacagaaagaaaagctaattcaaagtgaagtggccctaaatgatttacatttaaccaagcagaaacttgaggacaaagtagaaaatttagtagatcagctaaataaatcacaagaaagtaatgtaagcatccagaaggagaatttagaacttaaggagcatattagacaaaatgaggaggagctttctagaataaggaatgagttaatgcagtctctaaatcaagactctaatagtaattttaaggataccttacttaaagaaagagaagctgaagttagaaacttaaagcaaaatctttcagaattagaacagctcaatgaaaatttaaagaaagttgcttttgatgtcaaaatggaaaatgaaaagttagttttagcatgtgaagatgtgaggcatcagttagaagaatgtcttgctggtaacaatcagctttctctggaaaaaaacactattgtggagactctaaaaatggaaaaaggagagatagaggcagaattgtgttgggctaaaaagaggctgttggaagaagcaaacaagtatgagaaaaccattgaagaactgtcaaatgcacgtaatttgaatacctctgccttacagctggaacatgagcatttaattaaactcaatcaaaagaaagacatggaaatagcagaactcaaaaagaatattgaacaaatggatactgaccataaagaaactaaggacgttttgtcatctagtttagaagagcagaagcagttgacacaacttataaacaagaaagaaatttttattgaaaagcttaaagaaagaagttcaaagctgcaggaggaattggataaatattctcaggccttaagaaaaaatgaaattttaagacagaccatagaggaaaaagaccgaagtcttggatccatgaaagaggaaaataatcatctgcaagaagaattggaacgactcagggaagagcagagtcgaaccgcacctgtggctgaccctaaaacccttgatagtgttactgaactagcatctgaggtatctcaactgaacacgatcaaggaacatcttgaagaggaaattaaacatcatcaaaagataattgaagatcaaaaccagagtaagatgcaactacttcagtctttacaagagcaaaagaaggaaatggatgagtttagataccagcatgagcaaatgaacgccacacacacccagctctttttagagaaggatgaggaaattaagagtttgcaaaaaacaattgaacaaatcaaaacccagttgcatgaagaaagacaggacattcaaacagataactctgatatttttcaagaaacaaaagttcagagccttaatatagaaaatggaagtgaaaagcatgatttatctaaagctgaaacggaaagattagtgaaaggaataaaagagcgagaactggagattaaacttctaaatgaaaagaatatatctttaactaaacagattgatcagttgtccaaagatgaagttggtaaactaactcagattattcagcagaaagatttggagatacaagctcttcatgctagaatttcttcaacttcccatactcaagatgttgtttaccttcaacagcaactgcaggcttatgctatggaaagagaaaaggtatttgctgttttgaatgagaagactagggaaaatagccatctaaaaacagaatatcacaaaatgatggatattgttgctgccaaggaagcagctcttatcaaactgcaagatgaaaataaaaaattgtccactagatttgaaagtagtggccaagatatgtttagagaaactattcagaatttatcacgtatcattcgagaaaaagacatcgaaatagatgcactaagtcagaaatgtcagactttattggcagttttacaaacatccagcactggtaatgaggctggaggtgttaatagtcatcaatttgaggagcttctacaggaacgtgacaagttaaaacagcaagtaaagaaaatggaagagtggaagcagcaggtgatgaccacagtacaaaatatgcaacacgagtcagcccagcttcaggaagagcttcaccaacttcaagcacaggttttggttgacagtgataataattctaaattacaagtggactatactggcctgatccaaagttatgagcagaatgaaaccaaactcaaaaattttgggcaggaattagcacaagttcagcacagcattgggcagctttgcaataccaaggatcttcttttaggaaaacttgatattatttcaccccagctgtcttctgcatcattgcttactccccagtctgcagagtgtcttagagcaagtaagtctgaagtattgagtgaatcttctgaattgcttcagcaagagttagaagagctaagaaaatcactacaggaaaaagatgcaacaattagaactctccaggaaaataaccacagattgtctgattcgattgctgccacctcagagctagaaagaaaagaacacgaacaaaccgattcagaaatcaagcagctaaaggagaaacaagatgttttgcaaaagttacttaaggaaaaagacctcttaatcaaagccaaaagtgatcaactactttcttccaatgaaaatttcactaacaaagtaaatgaaaacgaacttttgaggcaggcagtaacaaacctgaaggagagaatattaattctagagatggacattggcaaactaaaaggagaaaatgaaaaaatagtggaaacatacaggggaaaggaaacagaatatcaagcgttacaagagactaacatgaagttttctatgatgctgcgagaaaaagagtttgagtgccactcaatgaaggagaaggctcttgcttttgaacagctattgaaagagaaagaacagggcaagactggagagttaaatcagcttttaaatgcagttaaatcaatgcaggagaagacagttgtgtttcaacaggagagagaccaagtcatgttggccctgaaacaaaaacaaatggaaaatactgccctacagaatgaggttcaacgtttacgtgacaaagaatttcgttcaaaccaagagctagagagattgcgtaatcatcttttagaatcagaagattcttatacccgtgaagctttggctgcagaagatagagaggctaaactaagaaagaaagtcacagtattggaggaaaagctagtttcatcctctaatgcaatggaaaatgcaagccatcaagccagtgtgcaggtagagtcattgcaagaacagttgaatgtagtttccaagcaaagggatgaaactgcgctgcagctttctgtctctcaggaacaagtaaagcagtatgctctgtcactggccaacctgcagatggtactagagcatttccaacaagaggaaaaagctatgtattctgctgaactcgaaaagcaaaaacagcttatagctgaatggaagaaaaacgcagaaaatctggaaggaaaagtgatatcattacaggaatgtttggatgaagcaaatgctgcattggattcagcatcaagacttacagaacagttagatgtaaaagaagaacaaattgaagaacttaaaagacaaaatgagctccgacaagaaatgctggatgatgtacaaaagaaattgatgagcttagcaaacagctcagaaggaaaagtagacaaagtcctaatgagaaacctcttcattggtcatttccacacaccgaaaaatcagcgtcatgaagtgttacggttaatggggagcatcctgggcgtcagaagggaggagatggagcagttgtttcatgacgatcagggcagtgttaccaggtggatgactgggtggcttggaggaggatcaaaaagtgttcccaacacacctttgagaccaaatcagcaatctgtggttaatagttctttttcagaactttttgttaaatttctagaaacagaatctcatccatccattccaccaccaaagctttctgttcatgatatgaaacctctggattcaccaggaagaagaaaaagagatacaaatgcaccagaaagttttaaagatacagcagaatccaggtctggtagaagaacagatgtaaatccgtttttggctcctcgctcggcagctgtacctcttattaacccagctggacttggacctggtgggcccgggcatcttcttctgaaacccatctcagatgttttgcccacatttacacctttgccagcgttacctgacaacagtgctggggttgtgctgaaagaccttttaaagcaatagatgattctcaagccagagacaatctagcactttaaagaaaccatgaacactatatgtatgtactttatcacaaagtggcctttggggagaaagtcatgtatttgttcgcaattatgctttctctgaatttaataaaaatattcctaatgcttttag

SEQ ID NO: 419 - protein, 1979 aa, Homo sapiens
MSSWLGGLGSGLGQSLGQVGGSLASLTGQISNFTKDMLMEGTEEVEAELPDSRTKEIEAIHAILRSENERLKKLCTDLEEKHEASEIQIKQQSTSYRNQLQQKEVEISHLKARQIALQDQLLKLQSAAQSVPSGAGVPATTASSSFAYGISHHPSAFHDDDMDFGDIISSQQEINRLSNEVSRLESEVGHWRHIAQTSKAQGTDNSDQSEICKLQNIIKELKQNRSQEIDDHQHEMSVLQNAHQQKLTEISRRHREELSDYEERIEELENLLQQGGSGVIETDLSKIYEMQKTIQVLQIEKVESTKKMEQLEDKIKDINKKLSSAENDRDILRREQEQLNVEKRQIMEECENLKLECSKLQPSAVKQSDTMTEKERILAQSASVEEVFRLQQALSDAENEIMRLSSLNQDNSLAEDNLKLKMRIEVLEKEKSLLSQEKEELQMSLLKLNNEYEVIKSTATRDISLDSELHDLRLNLEAKEQELNQSISEKETLIAEIEELDRQNQEATKHMILIKDQLSKQQNEGDSIISKLKQDLNDEKKRVHQLEDDKMDITKELDVQKEKLIQSEVALNDLHLTKQKLEDKVENLVDQLNKSQESNVSIQKENLELKEHIRQNEEELSRIRNELMQSLNQDSNSNFKDTLLKEREAEVRNLKQNLSELEQLNENLKKVAFDVKMENEKLVLACEDVRHQLEECLAGNNQLSLEKNTIVETLKMEKGEIEAELCWAKKRLLEEANKYEKTIEELSNARNLNTSALQLEHEHLIKLNQKKDMEIAELKKNIEQMDTDHKETKDVLSSSLEEQKQLTQLINKKEIFIEKLKERSSKLQEELDKYSQALRKNEILRQTIEEKDRSLGSMKEENNHLQEELERLREEQSRTAPVADPKTLDSVTELASEVSQLNTIKEHLEEEIKHHQKIIEDQNQSKMQLLQSLQEQKKEMDEFRYQHEQMNATHTQLFLEKDEEIKSLQKTIEQIKTQLHEERQDIQTDNSDIFQETKVQSLNIENGSEKHDLSKAETERLVKGIKERELEIKLLNEKNISLTKQIDQLSKDEVGKLTQIIQQKDLEIQALHARISSTSHTQDVVYLQQQLQAYAMEREKVFAVLNEKTRENSHLKTEYHKMMDIVAAKEAALIKLQDENKKLSTRFESSGQDMFRETIQNLSRIIREKDIEIDALSQKCQTLLAVLQTSSTGNEAGGVNSHQFEELLQERDKLKQQVKKMEEWKQQVMTTVQNMQHESAQLQEELHQLQAQVLVDSDNNSKLQVDYTGLIQSYEQNETKLKNFGQELAQVQHSIGQLCNTKDLLLGKLDIISPQLSSASLLTPQSAECLRASKSEVLSESSELLQQELEELRKSLQEKDATIRTLQENNHRLSDSIAATSELERKEHEQTDSEIKQLKEKQDVLQKLLKEKDLLIKAKSDQLLSSNENFTNKVNENELLRQAVTNLKERILILEMDIGKLKGENEKIVETYRGKETEYQALQETNMKFSMMLREKEFECHSMKEKALAFEQLLKEKEQGKTGELNQLLNAVKSMQEKTVVFQQERDQVMLALKQKQMENTALQNEVQRLRDKEFRSNQELERLRNHLLESEDSYTREALAAEDREAKLRKKVTVLEEKLVSSSNAMENASHQASVQVESLQEQLNVVSKQRDETALQLSVSQEQVKQYALSLANLQMVLEHFQQEEKAMYSAELEKQKQLIAEWKKNAENLEGKVISLQECLDEANAALDSASRLTEQLDVKEEQIEELKRQNELRQEMLDDVQKKLMSLANSSEGKVDKVLMRNLFIGHFHTPKNQRHEVLRLMGSILGVRREEMEQLFHDDQGSVTRWMTGWLGGGSKSVPNTPLRPNQQSVVNSSFSELFVKFLETESHPSIPPPKLSVHDMKPLDSPGRRKRDTNAPESFKDTAESRSGRRTDVNPFLAPRSAAVPLINPAGLGPGGPGHLLLKPISDVLPTFTPLPALPDNSAGVVLKDLLKQ

SEQ ID NO: 420 - DNA, 5668 bp, Homo sapiens
gtcacttaggaaaaggtgtcctttcgggcagccgggctcagcatgaggaacagaaggaatgacactctggacagcacccggaccctgtactccagcgcgtctcggagcacagacttgtcttacagtgaaagcgacttggtgaattttattcaagcaaattttaagaaacgagaatgtgtcttctttaccaaagattccaaggccacggagaatgtgtgcaagtgtggctatgcccagagccagcacatggaaggcacccagatcaaccaaagtgagaaatggaactacaagaaacacaccaaggaatttcctaccgacgcctttggggatattcagtttgagacactggggaagaaagggaagtatatacgtctgtcctgcgacacggacgcggaaatcctttacgagctgctgacccagcactggcacctgaaaacacccaacctggtcatttctgtgaccgggggcgccaagaacttcgccctgaagccgcgcatgcgcaagatcttcagccggctcatctacatcgcgcagtccaaaggtgcttggattctcacgggaggcacccattatggcctgacgaagtacatcggggaggtggtgagagataacaccatcagcaggagttcagaggagaatattgtggccattggcatagcagcttggggcatggtctccaaccgggacaccctcatcaggaattgcgatgctgagggctattttttagcccagtaccttatggatgacttcacaagggatccactgtatatcctggacaacaaccacacacatttgctgctcgtggacaatggctgtcatggacatcccactgtcgaagcaaagctccggaatcagctagagaagcatatctctgagcgcactattcaagattccaactatggtggcaagatccccattgtgtgttttgcccaaggaggtggaaaagagactttgaaagccatcaatacctccatcaaaaataaaattccttgtgtggtggtggaaggctcgggccggatcgctgatgtgatcgctagcctggtggaggtggaggatgccccgacatcttctgccgtcaaggagaagctggtgcgctttttaccccgcacggtgtcccggctgtctgaggaggagactgagagttggatcaaatggctcaaagaaattctcgaatgttctcacctattaacagttattaaaatggaagaagctggggatgaaattgtgagcaatgccatctcctacgctctatacaaagccttcagcaccagtgagcaagacaaggataactggaatgggcagctgaagcttctgctggagtggaaccagctggacttagccaatgatgagattttcaccaatgaccgccgatgggagtctgctgaccttcaagaagtcatgtttacggctctcataaaggacagacccaagtttgtccgcctctttctggagaatggcttgaacctacggaagtttctcacccatgatgtcctcactgaactcttctccaaccacttcagcacgcttgtgtaccggaatctgcagatcgccaagaattcctataatgatgccctcctcacgtttgtctggaaactggttgcgaacttccgaagaggcttccggaaggaagacagaaatggccgggacgagatggacatagaactccacgacgtgtctcctattactcggcaccccctgcaagctctcttcatctgggccattcttcagaataagaaggaactctccaaagtcatttgggagcagaccaggggctgcactctggcagccctgggagccagcaagcttctgaagactctggccaaagtgaagaacgacatcaatgctgctggggagtccgaggagctggctaatgagtacgagacccgggctgttgagctgttcactgagtgttacagcagcgatgaagacttggcagaacagctgctggtctattcctgtgaagcttggggtggaagcaactgtctggagctggcggtggaggccacagaccagcatttcaccgcccagcctggggtccagaattttctttctaagcaatggtatggagagatttcccgagacaccaagaactggaagattatcctgtgtctgtttattatacccttggtgggctgtggctttgtatcatttaggaagaaacctgtcgacaagcacaagaagctgctttggtactatgtggcgttcttcacctcccccttcgtggtcttctcctggaatgtggtcttctacatcgccttcctcctgctgtttgcctacgtgctgctcatggatttccattcggtgccacacccccccgagctggtcctgtactcgctggtctttgtcctcttctgtgatgaagtgagacagtggtacgtaaatggggtgaattattttactgacctgtggaatgtgatggacacgctggggcttttttacttcatagcaggaattgtatttcggctccactcttctaataaaagctctttgtattctggacgagtcattttctgtctggactacattattttcactctaagattgatccacatttttactgtaagcagaaacttaggacccaagattataatgctgcagaggatgctgatcgatgtgttcttcttcctgttcctctttgcggtgtggatggtggcctttggcgtggccaggcaagggatccttaggcagaatgagcagcgctggaggtggatattccgttcggtcatctacgagccctacctggccatgttcggccaggtgcccagtgacgtggatggtaccacgtatgactttgcccactgcaccttcactgggaatgagtccaagccactgtgtgtggagctggatgagcacaacctgccccggttccccgagtggatcaccatccccctggtgtgcatctacatgttatccaccaacatcctgctggtcaacctgctggtcgccatgtttggctacacggtgggcaccgtccaggagaacaatgaccaggtctggaagttccagaggtacttcctggtgcaggagtactgcagccgcctcaatatccccttccccttcatcgtcttcgcttacttctacatggtggtgaagaagtgcttcaagtgttgctgcaaggagaaaaacatggagtcttctgtctgctgtttcaaaaatgaagacaatgagactctggcatgggagggtgtcatgaaggaaaactaccttgtcaagatcaacacaaaagccaacgacacctcagaggaaatgaggcatcgatttagacaactggatacaaagcttaatgatctcaagggtcttctgaaagagattgctaataaaatcaaataaaactgtatgaaactctaatggagaaaaatctaattatagcaagatcatattaaggaatgctgatgaacaattttgctatcgactactaaatgagagattttcagacccctgggtacatggtggatgattttaaatcaccctagtgtgctgagaccttgagaataaagtgtgtgattggtttcatacttgaagacggatataaaggaagaatatttcctttatgtgtttctccagaatggtgcctgtttctctctgtgtctcaatgcctgggactggaggttgatagtttaagtgtgttcttaccgcctcctttttcctttaatcttatttttgatgaacacatatataggagaacatctatcctatgaataagaacctggtcatgctttactcctgtattgttattttgttcatttccaattgattctctacttttcccttttttgtattatgtgactaattagttggcatattgttaaaagtctctcaaattaggccagattctaaaacatgctgcagcaagaggaccccgctctcttcaggaaaagtgttttcatttctcaggatgcttcttacctgtcagaggaggtgacaaggcagtctcttgctctcttggactcaccaggctcctattgaaggaaccacccccattcctaaatatgtgaaaagtcgcccaaaatgcaaccttgaaaggcactactgactttgttcttattggatactcctcttatttattatttttccattaaaaataatagctggctattatagaaaatttagaccatacagagatgtagaaagaacataaattgtccccattaccttaaggtaatcactgctaacaatttctggatggtttttcaagtctattttttttctatgtatgtctcaattctctttcaaaattttacagaatgttatcatactacatatatactttttatgtaagctttttcacttagtattttatcaaatatgtttttattatattcatagccttcttaaacattatatcaataattgcataataggcaacctctagcgattaccataattttgctcattgaaggctatctccagttgatcattgggatgagcatctttgtgcatgaatcctattgctgtatttgggaaaattttccaaggttagattccaataaatatctatttattattaaatattaaaatatcgatttattattaaaaccatttataaggctttttcataaatgtatagcaaataggaattattaacttgagcataagatatgagatacatgaacctgaactattaaaataaaatattatatttaaccctagtttaagaagaagtcaatatgcttatttaaatattatggatggtgggcagatcacttgaggtcaggagttcgagaccagcctggccaacatggcaaaaccacatctctactaaaaataaaaaaattagctgggtgtggtggtgcactcctgtaatcccagctactcagaaggctgaggtacaagaattgctggaacctgggaggcggaggttgcagtgaaccaagattgcaccactgcactccagccggggtgacagagtgagactccgactgaaaataaataaataaataaataaataaataaataaataaatattatggatggtgaagggaatggtatagaattggagagattatcttactgaacacctgtagtcccagctttctctggaagtggtggtatttgagcaggatgtgcacaaggcaattgaaatgcccataattagtttctcagctttgaatacactataaactcagtggctgaaggaggaaattttagaaggaagctactaaaagatctaatttgaaaaactacaaaagcattaactaaaaaagtttattttccttttgtctgggcagtagtgaaaataactactcacaacattcactatgtttgcaaggaattaacacaaataaaagatgcctttttacttaaacgccaagacagaaaacttgcccaatactgagaagcaacttgcattagagagggaactgttaaatgttttcaacccagttcatctggtggatgtttttgcaggttactctgagaattttgcttatgaaaaatcattatttttagtgtagttcacaataatgtattgaacatacttctaatcaaaggtgctatgtccttgtgtatggtactaaatgtgtcctgtgtacttttgcacaactgagaatcctgcggcttggtttaatgagtgtgttcatgaaataaataatggaggaattgtcaaaaaaaaaaaaaaaaaaaaaaaaaaaaaaaaaaaaaaaaaaaaaaaaaaaaaaaaaaaaaaaaa

SEQ ID NO: 421 - protein, 1095 aa, Homo sapiens
MRNRRNDTLDSTRTLYSSASRSTDLSYSESDLVNFIQANFKKRECVFFTKDSKATENVCKCGYAQSQHMEGTQINQSEKWNYKKHTKEFPTDAFGDIQFETLGKKGKYIRLSCDTDAEILYELLTQHWHLKTPNLVISVTGGAKNFALKPRMRKIFSRLIYIAQSKGAWILTGGTHYGLTKYIGEVVRDNTISRSSEENIVAIGIAAWGMVSNRDTLIRNCDAEGYFLAQYLMDDFTRDPLYILDNNHTHLLLVDNGCHGHPTVEAKLRNQLEKHISERTIQDSNYGGKIPIVCFAQGGGKETLKAINTSIKNKIPCVVVEGSGRIADVIASLVEVEDAPTSSAVKEKLVRFLPRTVSRLSEEETESWIKWLKEILECSHLLTVIKMEEAGDEIVSNAISYALYKAFSTSEQDKDNWNGQLKLLLEWNQLDLANDEIFTNDRRWESADLQEVMFTALIKDRPKFVRLFLENGLNLRKFLTHDVLTELFSNHFSTLVYRNLQIAKNSYNDALLTFVWKLVANFRRGFRKEDRNGRDEMDIELHDVSPITRHPLQALFIWAILQNKKELSKVIWEQTRGCTLAALGASKLLKTLAKVKNDINAAGESEELANEYETRAVELFTECYSSDEDLAEQLLVYSCEAWGGSNCLELAVEATDQHFTAQPGVQNFLSKQWYGEISRDTKNWKIILCLFIIPLVGCGFVSFRKKPVDKHKKLLWYYVAFFTSPFVVFSWNVVFYIAFLLLFAYVLLMDFHSVPHPPELVLYSLVFVLFCDEVRQWYVNGVNYFTDLWNVMDTLGLFYFIAGIVFRLHSSNKSSLYSGRVIFCLDYIIFTLRLIHIFTVSRNLGPKIIMLQRMLIDVFFFLFLFAVWMVAFGVARQGILRQNEQRWRWIFRSVIYEPYLAMFGQVPSDVDGTTYDFAHCTFTGNESKPLCVELDEHNLPRFPEWITIPLVCIYMLSTNILLVNLLVAMFGYTVGTVQENNDQVWKFQRYFLVQEYCSRLNIPFPFIVFAYFYMVVKKCFKCCCKEKNMESSVCCFKNEDNETLAWEGVMKENYLVKINTKANDTSEEMRHRFRQLDTKLNDLKGLLKEIANKIK

SEQ ID NO: 422 - DNA, 1154 bp, Homo sapiens
cacgagggcgtccctctgcctgcccactcagtggcaacacccgggagctgttttgtcctttgtggagcctcagcagttccctctttcagaactcactgccaagagccctgaacaggagccaccatgcagtgcttcagcttcattaagaccatgatgatcctcttcaatttgctcatctttctgtgtggtgcagccctgttggcagtgggcatctgggtgtcaatcgatggggcatcctttctgaagatcttcgggccactgtcgtccagtgccatgcagtttgtcaacgtgggctacttcctcatcgcagccggcgttgtggtctttgctcttggtttcctgggctgctatggtgctaagactgagagcaagtgtgccctcgtgacgttcttcttcatcctcctcctcatcttcattgctgaggttgcagctgctgtggtcgccttggtgtacaccacaatggctgagcacttcctgacgttgctggtagtgcctgccatcaagaaagattatggttcccaggaagacttcactcaagtgtggaacaccaccatgaaagggctcaagtgctgtggcttcaccaactatacggattttgaggactcaccctacttcaaagagaacagtgcctttcccccattctgttgcaatgacaacgtcaccaacacagccaatgaaacctgcaccaagcaaaaggctcacgaccaaaaagtagagggttgcttcaatcagcttttgtatgacatccgaactaatgcagtcaccgtgggtggtgtggcagctggaattgggggcctcgagttcttttccaactcagctcgaaggccacctcttccagaaagcctctatagcactcccatcagaagagatcacgtctttctacaaccctcccctccatgactttcatggctcttagagcctctgctgtctctgcttcatcctggaagtatcacaatcctccaccacactgaacccctcaaggtagggccaggtctgattactttcaggtccccagtgcccagcacaaggctgaggccaaaaaaaggaccaggggatggttataaaataaatcaatgaattgactgcctaaaaaaaaaaaaaaaaaaaaaaaaaaaaaaaaaaaaaaaaaagaaaaaaaaaaaaaaaaaaaaagt

SEQ ID NO: 423 - protein, 258 aa, Homo sapiens
MQCFSFIKTMMILFNLLIFLCGAALLAVGIWVSIDGASFLKIFGPLSSSAMQFVNVGYFLIAAGVVVFALGFLGCYGAKTESKCALVTFFFILLLIFIAEVAAAVVALVYTTMAEHFLTLLVVPAIKKDYGSQEDFTQVWNTTMKGLKCCGFTNYTDFEDSPYFKENSAFPPFCCNDNVTNTANETCTKQKAHDQKVEGCFNQLLYDIRTNAVTVGGVAAGIGGLEFFSNSARRPPLPESLYSTPIRRDHVFLQPSPP

SEQ ID NO: 424 - DNA, 1076 bp, Homo sapiens
atgcagtgcttcagcttcattaagaccatgatgatcctcttcaatttgctcatctttctgtgtggtgcagccctgttggcagtgggcatctgggtgtcaatcgatggggcatcctttctgaagatcttcgggccactgtcgtccagtgccatgcagtttgtcaacgtgggctacttcctcatcgcagccggcgttgtggtctttgctcttggtttcctgggctgctatggtgctaagactgagagcaagtgtgccctcgtgacgttcttcttcatcctcctcctcatcttcattgctgaggttgcagctgctgtggtcgccttggtgtacaccacaatggctgagcacttcctgacgttgctggtagtgcctgccatcaagaaagattatggttcccaggaagacttcactcaagtgtggaacaccaccatgaaagggctcaagtgctgtggcttcaccaactatacggattttgaggactcaccctacttcaaagagaacagtgcctttcccccattctgttgcaatgacaacgtcaccaacacagccaatgaaacctgcaccgagcaaaaggctcacgaccaaaaagtagagggttgcttcaatcagcttttgtatgacatccgaactaatgcagtcaccgtgggtggtgtggcagctggaattgggggcctcgagctggctgccatgattgtgtccatgtatctgtactgcaatctacaataagtccacttctgcctctgccactactgctgccacatgggaactgtgaagaggcaccctggcaagcagcagtgattgggggaggggacaggatctaacaatgtcacttgggccagaatggacctgccctttctgctccagacttggggctagatagggaccactccttttaggcgatgctgactttccttccattggtgggtggatgggtggggggcattccagagcctctaaggtagccagttctgttgcccattcccccagtctattaaacccttgatatgccccctaggcctagtggtgatcccagtgctctactgggggatgagagaaaggcattttatagcctgggc

SEQ ID NO: 425 - protein, 241 aa, Homo sapiens
MQCFSFIKTMMILFNLLIFLCGAALLAVGIWVSIDGASFLKIFGPLSSSAMQFVNVGYFLIAAGVVVFALGFLGCYGAKTESKCALVTFFFILLLIFIAEVAAAVVALVYTTMAEHFLTLLVVPAIKKDYGSQEDFTQVWNTTMKGLKCCGFTNYTDFEDSPYFKENSAFPPFCCNDNVTNTANETCTEQKAHDQKVEGCFNQLLYDIRTNAVTVGGVAAGIGGLELAAMIVSMYLYCNLQ

SEQ ID NO: 426 - DNA, 1518 bp, Homo sapiens
atgaacattaatgacctcaaactcacgttgtccaaagctgggcaagagcacctactacgtttctggaatgagcttgaagaagcccaacaggtagaactttatgcagagctccaggccatgaactttgaggagctgaacttctttttccaaaaggccattgaaggttttaaccagtcttctcaccaaaagaatgtggatgcacgaatggaacctgtgcctcgagaggtattaggcagtgctacaagggatcaagatcagctccaggcctgggaaagtgaaggacttttccagatttctcagaataaagtagcagttcttcttctagctggtgggcaggggacaagactcggcgttgcatatcctaaggggatgtatgatgttggtttgccatcccgtaagacactttttcagattcaagcagagcgtatcctgaagctacagcaggttgctgaaaaatattatggcaacaaatgcattattccatggtatataatgaccagtggcagaacaatggaatctacaaaggagttcttcaccaagcacaagtactttggtttaaaaaaagagaatgtaatcttttttcagcaaggaatgctccccgccatgagttttgatgggaaaattattttggaagagaagaacaaagtttctatggctccagatgggaatggtggtctttatcgggcacttgcagcccagaatattgtggaggatatggagcaaagaggcatttggagcattcatgtctattgtgttgacaacatattagtaaaagtggcagacccacggttcattggattttgcattcagaaaggagcagactgtggagcaaaggtggtagagaaaacgaaccctacagaaccagttggagtggtttgccgagtggatggagtttaccaggtggtagaatatagtgagatttccctggcaacagctcaaaaacgaagctcagacggacgactgctgttcaatgcggggaacattgccaaccatttcttcactgtaccatttctgagagatgttgtcaatgtttatgaacctcagttgcagcaccatgtggctcaaaagaagattccttatgtggatacccaaggacagttaattaagccagacaaacccaatggaataaagatggaaaaatttgtctttgacatcttccagtttgcaaagaagtttgtggtatatgaagtattgcgagaagatgagttttccccactaaagaatgctgatagtcagaatgggaaagacaaccctactactgcaaggcatgctttgatgtcccttcatcattgctgggtcctcaatgcagggggccatttcatagatgaaaatagctctcgccttccagcaattccccgcttgaaggatgccaatgatgtaccaatccaatgtgaaatctctcctcttatctcctatgctggagaaggattagaaagttatgtggcagataaagaattccatgcacctctaatcatcgatgagaatggagttcatgagctggtgaaaaatggtatttga

SEQ ID NO: 427 - protein, 505 aa, Homo sapiens
MNINDLKLTLSKAGQEHLLRFWNELEEAQQVELYAELQAMNFEELNFFFQKAIEGFNQSSHQKNVDARMEPVPREVLGSATRDQDQLQAWESEGLFQISQNKVAVLLLAGGQGTRLGVAYPKGMYDVGLPSRKTLFQIQAERILKLQQVAEKYYGNKCIIPWYIMTSGRTMESTKEFFTKHKYFGLKKENVIFFQQGMLPAMSFDGKIILEEKNKVSMAPDGNGGLYRALAAQNIVEDMEQRGIWSIHVYCVDNILVKVADPRFIGFCIQKGADCGAKVVEKTNPTEPVGVVCRVDGVYQVVEYSEISLATAQKRSSDGRLLFNAGNIANHFFTVPFLRDVVNVYEPQLQHHVAQKKIPYVDTQGQLIKPDKPNGIKMEKFVFDIFQFAKKFVVYEVLREDEFSPLKNADSQNGKDNPTTARHALMSLHHCWVLNAGGHFIDENSSRLPAIPRLKDANDVPIQCEISPLISYAGEGLESYVADKEFHAPLIIDENGVHELVKNGI

SEQ ID NO: 428 - DNA, 2900 bp, Homo sapiens
  misc_feature 2439, 2441, 2468, 2493: n = A,T,C or G
cctcgcgagcgacgcgcggctgaggcgaggtcgctcggccactgtatgcggggccatggcggggaccgcgctcaagaggctgatggccgtgtacaaacaattaacactgaatcctccggaaggaattgtagcaggccccatgaatgaagagaacttttttgaatgggaggcattgatcatgggcccagaagacacctgctttgagtttggtgtttttcctgccatcctgagtttcccacttgattacccgttaagtcccccaaagatgagatttacctgtgagatgtttcatcccaacatctaccctgatgggagagtctgcatttccatcctccacgccccaggcgatgacccccatgggctacgagagcagccggagcggtggagtcctgtgcagagtgtggagaagatcctgctgtcggtggtgagcatgctggcagagcccaatgacgaaagtggagctaacgtggatgcgtccaaaatgtggcgcgatgaccgggagcagttctataagattgccaagcagatcgtccagaagtctctgggactgtgagacctggcctcgcacaggcgcgcacacaccgccaagcagctcagcattctcccccggcacacttagtgacagtgatgctctgtgctggtaccaaacaaggcagacttgcaagaaccatggcatcttttttttttttcaaacctttcctacttcaaacaggcttctcttctgaaatgatgacttaatgtcgaatattgacagcttactgcagttttacagtattcctcacaaagggcttcaggtagattatcagagctgtcagcactacctctccccgctgaaaccagcagttcatggcttcctgtggattccctccctccctggagtgttgagggggttgtacctgccagacttccaggggacgatggaatacccagaacgctccttctgaagaaatggggccctgtagctgcagcacaggggaagggcccggcaccctttctgggtccttcctggttccctgtgggccccatgaggagtccattacttcctttcttccttcatattttacaggcagatgcttttcttataatctaattacatcttttcatttgttatatattacaaaccatcacacttagaaatacttccagggaatgcttttttgaagtgtgaattaataagaaatggggtaaatagaaaagaaatttattgctgattggccaggtgcggtggttcgtgcctgtaatcccagctctttgggaggccaaggcaggtagatcacaaggtcaggaaattgagaccatcctggctaatacagtgaaaccccatgtctgctaaaattacaaaaaattagctgggcgtggtggtgcacgcctgtagtctcagctactcaggaggctgaggcaggagaatcgcttgaacccgggaggcagaggtagcagtgagctgaagtcccgccactgcactccagcctgggcaacagagcgagactcagtctcaaaaagaaaaaagaaatttattgctgatcacaaggacagacagttttttcccgaccatactcatcaaagatttacgtttgtatattagtaactagtgcattactagagcaggtgcaggtgaggtctttaaagtttcaatgaaagtttcttctggatctacagaaaaaaattttttttttcaatctaaaaactggaaattctagggtttttgtacattttggatgcactgggaatttattagcacaaaatcattctttgcaactcaaaattcagaagggactctaccatatcttagctcagagcacagaggagtgccttatccccacacttgactgggctgtggaggtgggcatgtgggcccctggcagsgacwtsggggacagagcccttgttttgtgacttaggattttgatgtggttcccatgttctctaacagggccagctgagcagcacaggccaggaggcacagtgtaagcaataacagatctgccacatgcagaagcaaatatcaggcctgtcgcacacgggcggcatttaaataggaatttctatttttgaaataagggatggtctatgaggcatacagtagatttgatgtgatccttttctccctcccttccataatggatcgtggtctgtgtgactgaacccacacagagtgtcatgggtgacagtttctggttgaagtagctccacgcctggcttctgtggacagcagattcttttccttctcacaaggggctcatttaaaatttggaggctgggtgctgtggctcacgcctgcaatcccagcactttgggagactgaggcgggcggatcatgaggtcaggagatcgcgaccatcctggctaacagtgaaaccctgtctccactaaaaatacaaaaaattagccgggcgtggtggcgggcgcctgtagtcccagctactctgaagactgaggcangngaatggcgtgaacccaggaggcggctntcagtgagctgagatcgcgccactncactccagcctgggcaacagagtgagactctgtctcaaaaaaaaaaaaaaaaaaaaaaatggaacgcagggcaagaactcgtatttggaaggagatgggggaaaggagcggtattatacctaagttgtatttgcaggcaaatgagatggagccctctctgtaaagaagagtcatttgtgcaagtagacggggtctgtgggtgcaggccctggaggggcacacaattgcctggaggcttctgtgagatcgggagagggaggagaggcagtctcttgacaaaataaagtatttttattcatttgtatttattaaatgaaaaaacaatcccatggtgtccctgttgtgtggtggaacctaatgactgttgaaataaagttctgtgttttccctgccctgcaaaaaaaaaa

SEQ ID NO: 429 - protein, 165 aa, Homo sapiens
MAGTALKRLMAVYKQLTLNPPEGIVAGPMNEENFFEWEALIMGPEDTCFEFGVFPAILSFPLDYPLSPPKMRFTCEMFHPNIYPDGRVCISILHAPGDDPHGLREQPERWSPVQSVEKILLSVVSMLAEPNDESGANVDASKMWRDDREQFYKIAKQIVQKSLGL

SEQ ID NO: 430 - DNA, 7907 bp, Homo sapiens
aaactttgcaaagttccgcgtcagagcctggggaggcaaagtgctcccccttctccccggcgttccccctccctctgcccccgcctccctgtcctcgcacagccgggagcacccgtgataggacgagccccgggcgtgcattgtgtatatgcaaaccggagctgggctccccacggctgcccgacccgggcctgggctgtggctgtgactggcgctgccgtgggcgccgcagccctcgcgggagccggacgcggtaatgccccagcggcgcagcgggcggctgcgtccctgagccgctatataagcgcggcagggaacatccggaggggctgaagatgaaggtgcccgcgcatgggcccccgctgattgccagtccctcccgaccccgcgccccgcgcggagcccgaggccgccgaggacccgccttcgccgcagtagcagctggagcagcgacagaggcggcagctgcggcggcggcggcgcccgcgcccctcgcgccagcgcgtagagcggcggcggcagctcgggggccgccactgccccggctgccatgagttgtgcggaggtgatgtatcacccccagccttatggagcgtcccagtatctgcccaaccccatggcagcgacaacctgccccacagcctactatcagccggcgccccaacctggccagcagaagaagttagcggtattcagcaagatgcaggactctctggaagtcacccttcccagcaaacaagaggaggaggatgaggaggaggaggaggaggagaaagaccagcctgccgagatggagtaccttaactctcgctgtgtccttttcacttatttccagggagacattgggtcagtagtggatgaacacttctcaagagctttgggccaagccatcaccctccatccagaatctgccatttcaaaaagcaagatggggctaacccccctatggcgagacagctcagctctctcaagccagcggaatagtttcccaacttccttttggaccagctcttaccagcccccacctgcaccttgtttggggggagttcatcctgacttccaggtcactggaccccctggcaccttttctgcagctgatcccagtccttggccgggacacaacctgcatcagactggcccagcccctccccctgctgtgtctgagtcctggccttatcctttgacatctcaggtgagcccatcctacagccatatgcatgacgtgtacatgcggcaccaccaccctcatgcccacatgcaccaccgccaccgccaccatcatcaccatcaccaccctcctgctggctctgccctggatccatcctatgggcctctgctgatgccttcagtgcatgcggccaggattcctgctccccagtgtgacatcacaaagacagaaccaactacagtcacctctgctacctcagcatgggctggagcctttcatggaacagtagacatagtgcccagcgtgggattcgatacaggtctacagcatcaagacaagagtaaggaatcaccgtggtactgaaacacacaatcttagtgagttaagttgcagcataaatccaagggcccactgggaaaagatactgtcgggtttttccattcagcaataggacacgaaaggcatagaaggagaagacaaagtgtcacgcagttgactggttttcggcctttcttgagaaagcaaagtgggtcccagacattgaagaaaagcatttttatttgtttatttcctcatctgagcctttgccaactgtgcaactctctccttttgttatcttgcttttatcaatatatagctaagtttttgtttcattttgatttttttttttagccaaccaccttgtcaggaaaggatggaaccacacattaaaatgttcattctttcaggaatacaagtttgtagctctatgtgcatctatttttgtagaaatacaaaaagtttggtttagcattgatgggctatttttgagggatgtattttttttaaaattgtaaaaattgttgagttctgtttaaagaacttgctctcagagaagcactggcaaaaatgtttaaaatgcttatctctaagatgtctattatatgctctgtctgtgctttctaggttacctcaaatgttttgtttttttccttcttacaaaagtagctataccgtagtcaaaccaatgcagtattgtttttacattgaatctcagtaaagatttaattccatgctagctcaattagttttgaattatatgtatagcttgaaaagtttttttttaatgactgtgctaaagaaatgatattttattgctttgatttctcccaaagaataacttggaggttgactaataagaaagttggcataaactttcaatcaaatgaagagtttgcctagaggagactaattctctttctagcccatccaaatttgataaatggaaccagaggttatatacaactacaaggaaaaaaatgcatttaaccatgccacctatgagtgccagtgacttattttacttgtttttaattattcattcatggcaatttaaaaagtcatattttaagtgggatttgtttttcctgaagggcatttgaaggaacaatatctgggaaggtactagagaaattacaaagcccgagctctttcttataatgccacctatccctgtaagctaaacaaacaaacaaacaaacaaacaaacagttctatatataatagtttcaacacagaacttaacaagtctctttttttgtttgtttaaatctggctttacttgatttaattcctttttagaaagaaatttagggcaaaataaagtgtatattaggatttaaatttatgccacaatttaaaaataaaaccagaggttatatacaatttaaattgggctaaaaattaaaaatttgaggatttaacttgatatagctctcaggatctaaataaagttgaaattatcattaagacactgctaggagaagattaagattatgaaagtaacagttattgatactgctggacttcaaaggcaaagttcatttcttccattaactgcttccagagatgtcatgtaaaaaagttagtgtattagagaagttttttagctttataaagaggttttttcaaatttctcccatttttctctccacccacataaaatagtatgttcagtgaaatgccactttctatctttaattgttcgtatcatatatgcgaactttttagacatgaacatgacatgttcagctaggcagagttctcatagataattttcaaatattttccttggctgtaatttatgtattcatttatatcctatccgtcttttgagcttcagatctatatactcttttgtactctcatcactccgcactttgctgtttcttacctagactctcttttacacaatatgcacatttttaccattgtggggtccaaatttaagataccttccactcactaataatatgaacttatatttcctgggagtagccaggttaaattttctatactttggtccataatttgatttgatatgattgtttcatttataatttgcccaaatacatggagcacaaaatttagtgaatttataaatctggatttgccttgtgtccttctgagttttcaaaggcaagtattcaacagtccctgtgtgatgactgacagggttatttgcctcatccacatccaccttcggaatacattaacttcctttgtaatttatttgaaagtagtgttaaactcattcagatcattcagttggattttcccaatgaagaggaaaaggaaagtagttattcctagctccatttcttattttccaccaaatttaattgaagggcattaattagatgtcttcaccctgaatttagactttgctctgtgttctcccggtaactgtcagacaaaaagtttattggctctgaggaactgagaaatgttgggaacctggtttctgctgtacacaggaaagatttgtaagtgagctctctctttgaaaacaggacccaggctgggcacagcagctcatgcctgtaatcctagtattataggaggcagaggctcgggaggattgcttgagcccaggagttcaagatcagcctaggcaacatagggagaccctatccctacaaaaaatttctgaaaaattacctgggcattgtggggcacacctgttgtcccagctactctggaggctgagtccggaggaacgtttgagcctgggagtttgagtttgcagcttgcagtgagctgtgattgcaccactgtactccagcttgggcaacagagcaagatcctgtctcaaaaggaaaaagaaaacaggacctaggtgtttggggtacactgccacccagggagtggatcaaaaatatacatagaaagagaatgagcatgtctctataattgtcttctaggaccatattgctgttagaagtcctaaaagaggatgggttgtaatttagcataatattctgaattcattccaagtttaaaatcctgtcattctctggctcttcttttttcacatcaaaatgatgctgttggacttagaggcttccgaactgttttattgagggctactatctgcctccacaattttattaaaaccactccacctttagacaaaggtgacttttgtctgattttacaaatcagattttattcaagctttctaaatatctgtgaagtagaccctagaaaattgtctcgtttattttaaatagaatctatgcttccaccaataaaccatcgggagctaagaaacaacataatgttgacaaatcaggaacctaacagattattttgtctctcattattaatttgaaagagcctctaaacttttgagaaatcaatgtgtcttcttaagaaagttaagcaccctctcttaactttcccctctatttgctctcctttttctttcttcttaagagtatttatattattttgttaagcaaaaatggctaagattgctctaaaatttgcaaaatgaggagtggattgcaaataattgagggatttatttctttaactttataagactttaaaaaaaaaacccaaattctaagcactgacatgaaagttgcctttgagaagcttgttattcattatacaaaaagtatttgcccattcctattctaagatttgcagaatatgtcaccctatctagcttttgagtttgctatctggtttaatgttgtatttataatttaaagtggaaatcagaaactgtttcaagaacctgtattctattccttactgagtgtcccttctttaaatagtgtttgctgaattaagccgatgggggcagtggcgttaagtggtggaaaaaggaaagtatatatgttagagttttgaatgagggataaatagaaagcagaatgaattaatggaaaagaactcggctgttaggccattctctaaattctagtttagccaaaagtttatgtgtggtttggggcttcatttatttatctcatgagtaaaatggaataatacctaacaggcaggctctggaagttggaaatcacatacacacacacacagacacacacacacacgatcaatcatgtagctcatattagatgttcaataaataacagctactacagatgcctatcagttgagtaagtagttcattaaattgagctcccaaaggtctcttctcttcacatccatatccgtttctgcagcaatcaaatagatacatgattgtttttctgtaagaaattactgcaaagagaatctttttctcctactaactgttccttctacctggtataggagataaatgtacgtttcttaattagctgactttttagtgtgtcatttctgaaggaaaaataaattaaccttaaagtggcatgtaggtccaattcagttttcctacatgttccaaaattttatttaaattactgtgtccaaaattatgaggacagtgtcattcattcaccatagtttatatttttagttatatatcaaacttccttggcacctaggataagaacatttcttttgaagttatccaatttttttttatttttacttgacttgaaggaaagttggaaaatatggtggaaaaaatcttccgcattaaaagggggaaaaaacacaaccatttacgatctcagtcagcagatttactctactcaaggaaaaaaagaaacaatcttattggaagcagatgttgacactgtgtcagttattgaagacggaaggagttcacttgagccattgcagttacaaaggggtattgatggcagtttggattcctgattgatcacctttgcagccaagggaaagacagcagaaactgtatgggatcagaaatgaaatcagcctgccagtttaatggagaggctcctagaaactcattttttttctttcctgtaagataaaagacatctttcagaataagaaaggcttgtttgagagagaaattacagtttattctctgaaaatatttaaaggccaaagtgccctttaaatctattattaaagcattgaaactgttattaaaatcattatagaaaaattaggtaaaaattttagcctaactttcaacatccattcaaaaacgaatgttgaaaacaaacatataacctataaaaaagtgaatggctctggcaagtgggggcatgggtggagtccataaggaaacctcagtctcaataacttcaaaatgttacttttcatggtaacttggtcatggagattggtcacagcacagacatttagaattttttagcaggttttttttttcttttgaatcttgtagtgctctctgggaattgcaccatgtacacttttacaacctacagaaatcgtcattattgttaaagtatctcaacttttctatttcttttattgtctattgtgcttttttgtttaaaaatacttttatagttttaaagtattggtcaaagtagtattctcttgaagttctagtcaatttaatttgatccaataagtttttctgaatctcctttttaagttccaagaaattctattataaataagtgtacttttaccaattccattgtataagcaaacagacaccttttagaaaaggataagtaatcatcaatttgttttttttaaaaaaaaaacaatttctagactactaaatttggcataagaataattcttttaaaatgcaacatactttaattagtttttttggtatatgcataagatgtgaactttcctattgatatcactttatattaatagagatgtacatttctttctatgccgtggctagagcaaaagttaataatgattatttacacaattgatttaatttcttaggatatgtataatattggatattatatctgatttaaaaatactattccatacattttttttttcaggagataaaacatagggaaaggttttcatgtgaattctttgtatcactttgaagtacatatatttaaagggaagatggatacaatttgtttttattatataaatctaggtaaggtgaaatgcttttgtcaacaaaaatacagtgtagtgaattttatatttgtcacttgattaggtaaactgaaaactaacaatagaaatattattttactgcattgaaataccatgaactttcagacttgttagttctacaagcagttgtgctaccttaattttgtgtttccagaaataaaaattaaccttagttatgctgtcatttttaactaataaaaaaagtataattcataaaacttttggctttataagataattataaaattatatatttttttctgtttttgtggggttgggaaaacattttcttatttctattcactcttcaaatgcaggtctcataatatgtgtcaatgatataagatgatggaagactttgtaataaaaacatatgtcattatcttcaatttgttcaataaataattta

SEQ ID NO: 431 - protein, 320 aa, Homo sapiens [sequence omitted]

SEQ ID NO: 432 - DNA, 2119 bp, Homo sapiens
cgtgacaatctgtctgtccgtctgcagctgcgtgactgtctgtctctgccatgtctctctccccatgccgggcccagaggggcttcagcgctcgctcagcctgttctgctcgctcaaggggccacagcaggggaggcttcagcagcaggggcggcttcagcagcaggagccttaattcctttggggggtgcctggaaggctctcgtgggagtacctgggggtcagggggtaggctgggggtgcggtttggggagtggagtggtgggcctgggctctccctgtgccctccggggggcatccaagaagtgaccatcaaccagaatccgctgaccccactgaagattgagatcgatccccagttccaggtggtgcggacgcaggagacccaggagatcagaaccctcaacaaccagtttgcttccttcattgacaaggtgcggttcctggagcagcagaacaaggtcctggagacgaagtggcatctgctgcagcaacaggggttgagtggcagccagcagggcctggagcctgtctttgaggcctgcctggatcagctcaggaagcagctggagcagctccagggagaacgaggggctctggatgctgagttgaaggcctgccgggaccaggaggaggagtataagtccaagtatgaggaggaggcccacaggcgtgccacacttgagaacgactttgtggtcctcaagaaggatgtggatggggttttcctgagcaagatggagttggagggcaagctggaggctctgagagagtacctctacttcttgaagcatctgaatgaagaagagctgggccagctccagacccaggccagcgacacgtctgtggtgctgtccatggacaacaaccgctacctggacttcagcagcatcatcactgaggtccgcgcccggtacgaggagatcacccggagcagcaaggctgaggctgaggccttgtaccagaccaagtaccaggaacttcaggtgtctgcccagcttcatggggacaggatgcaggaaacgaaagtccagatctctcagctacaccaagagattcagaggctgcagagtcagactgagaacctcaagaagcagaacgccagcctgcaggccgccatcactgatgctgagcagcgtggggagctggccctcaaggacgctcaggccaaggtggacgagctggaggctgctctgaggatggccaagcagaacctggcccggctgctgtgcgagtaccaggagctgacgagcacgaagctttccctggatgtggagattgccacttaccgcaggctgctggagggcgaggagtgcaggatgtctggggagtgcaccagccaggtcactatctcctcggtgggaggcagcgctgtcatgtctggaggagttggtggaggcttggggagcacttgtggactcggtagtgggaaaggcagccctgggtcctgctgcaccagcattgtgactggaggctccaacatcattctgggctctgggaaggaccctgttttggattcctgctctgtgtctggctccagcgctggctccagctgccacaccatcctgaagaagacagttgagtcgagtctgaagacatccatcacctactgagcgacccagcagccacctccttcctgaacacatttggcccactccccccatcagccggctctgcaaggccaactccgtgtccgctgcccacagcccaagccagcccacagcggatgctgcaaaaatcaataaagtctcccctcctgctgttctgaatgctctaagtgcttgcacacctcacccagccactctatcaagggatccttcaagctctccagtgtgttccttggggtgccctccatctcccacaactccactgatgttttagctgtgcttgtagctcacttcctcatcaactgcctgttttaagaggttctagtcctgactggggcagcccccttccttcttgttcctccttcttcctgactgtgcaccaaaattttctccttttaggaaccttctctaattcccatgtctaaactactgggcccttcctgtccctggcagtctggctgcacctgttgctgcctgggtgctatgtctgctggctctggtaagggactcag

SEQ ID NO: 433 - protein, 520 aa, Homo sapiens
MSLSPCRAQRGFSARSACSARSRGHSRGGFSSRGGFSSRSLNSFGGCLEGSRGSTWGSGGRLGVRFGEWSGGPGLSLCPPGGIQEVTINQNPLTPLKIEIDPQFQVVRTQETQEIRTLNNQFASFIDKVRFLEQQNKVLETKWHLLQQQGLSGSQQGLEPVFEACLDQLRKQLEQLQGERGALDAELKACRDQEEEYKSKYEEEAHRRATLENDFVVLKKDVDGVFLSKMELEGKLEALREYLYFLKHLNEEELGQLQTQASDTSVVLSMDNNRYLDFSSIITEVRARYEEITRSSKAEAEALYQTKYQELQVSAQLHGDRMQETKVQISQLHQEIQRLQSQTENLKKQNASLQAAITDAEQRGELALKDAQAKVDELEAALRMAKQNLARLLCEYQELTSTKLSLDVEIATYRRLLEGEECRMSGECTSQVTISSVGGSAVMSGGVGGGLGSTCGLGSGKGSPGSCCTSIVTGGSNIILGSGKDPVLDSCSVSGSSAGSSCHTILKKTVESSLKTSITY

SEQ ID NO: 434 - DNA, 702 bp, Homo sapiens
tttttttttaagttttaaaactctgccaaagcattgctcagtgtatctgggcagccccttccggcaaaacgcagcagtagcagaggcagcttctgagagcctgggcaggcagcagctggctgaccaagtccactggaagagaaggcttgtgccagccgggagaaggaagccggggacaggatgaaagcaacaacacctttgcagacagtcgaccggcccaaggactggtacaagacgatgtttaagcaaattcacatggtgcacaagccggatgatgacacagacatgtataatactccttatacatacaatgcaggtctgtacaacccaccctacagtgctcagtcacaccctgctgcaaagacccaaacctacagacctctttccaaaagccactccgacaacagccccaatgcctttaaggatgcgtcctccccagtgcctcccccacatgttccacctccagtcccgccgcttcgaccaagagatcggtcttcaacagaaaagcatgactgggatcctccagacagaaaagtggacacaagaaaatttcggtctgagccaaggagtatttttgaatatgaacctggcaagtcatcaattcttcagcatgaaagaccagtaagcacttgtcattaaacagaatatgccagctcgctgggctcccagggctccccaataaacctgaatttcagacccatt

SEQ ID NO: 435 - protein, 152 aa, Homo sapiens
MKATTPLQTVDRPKDWYKTMFKQIHMVHKPDDDTDMYNTPYTYNAGLYNPPYSAQSHPAAKTQTYRPLSKSHSDNSPNAFKDASSPVPPPHVPPPVPPLRPRDRSSTEKHDWDPPDRKVDTRKFRSEPRSIFEYEPGKSSILQHERPVSTCH

SEQ ID NO: 436 - DNA, 1492 bp, Homo sapiens
tgagggaagaagccgaaggggagtcggcggcacaaaatggcggcggcggcggcggcggctggtgctgcagggtcggcagctcccgcggcagcggccggcgccccgggatctgggggcgcaccctcagggtcgcagggggtgctgatcggggacaggctgtactccggggtgctcatcaccttggagaactgcctcctgcctgacgacaagctccgtttcacgccgtccatgtcgagcggcctcgacaccgacacagagaccgacctccgcgtggtgggctgcgagctcatccaggcggccggtatcctgctccgcctgccgcaggtggccatggctaccgggcaggtgttgttccagcggttcttttataccaagtccttcgtgaagcactccatggagcatgtgtcaatggcctgtgtccacctggcttccaagatagaagaggccccaagacgcatacgggacgtcatcaatgtgtttcaccgccttcgacagctgagagacaaaaagaagcccgtgcctctactactggatcaagattatgttaatttaaagaaccaaattataaaggcggaaagacgagttctcaaagagttgggtttctgcgtccatgtgaagcatcctcataagataatcgttatgtaccttcaggtgttagagtgtgagcgtaaccaacacctggtccagacctcatgggtagcctctgagggtaagtgactaagacttctcctctgctgtccaagcgctttggtgcagggacagcggcatcttcagccaatccagtgcaggctctccaccgaaggctggctctagactggtggtacgcacatagcatagccatggccgactcctgctgtggttctctgacgattgtgcttcttgttaatcctctgtcgtgctttggtaatcgtattgattagagttggtaactgtcttgacttgaattttgtccctttaaaactgctgtacctgtatgataaagatgcagtacctttctcttaaaaaaaaatgctatggaaagctgtgagaattgaagagacaaattggctgtgtcagtgtggggttatgtcatgatttctagaagccctgaagttgctcttttgagcagctttgcatgacacgctctggtaaaaggtgtgcatctttaaattatttcatggatactttgaaaaatattgtatcacttcaaatacagcaataagtttatatgttctcaagatttcatttgtttttaagaattttaagttcgtggattaatatcactacttgaatactgacagttgttgattagacaccgaaaggttactgattgttgaatgtatctgtgttagagctgtgcactggcacgcttgcatcaggggctggggccacacggccgccacacagattcccccgtgatgcctggagctgcttccagagccgggtgtctccaagaggcacctgtaggacttcccatttagaaatctcttgagtgggtttgtatgttaccttc

SEQ ID NO: 437 - protein, 226 aa, Homo sapiens
MAAAAAAAGAAGSAAPAAAAGAPGSGGAPSGSQGVLIGDRLYSGVLITLENCLLPDDKLRFTPSMSSGLDTDTETDLRVVGCELIQAAGILLRLPQVAMATGQVLFQRFFYTKSFVKHSMEHVSMACVHLASKIEEAPRRIRDVINVFHRLRQLRDKKKPVPLLLDQDYVNLKNQIIKAERRVLKELGFCVHVKHPHKIIVMYLQVLECERNQHLVQTSWVASEGK

SEQ ID NO: 438 - DNA, 2413 bp, Homo sapiens
cccaacacaatggctttataagaatgcttcacttgtgaaaaacaaatatcaaagtcttcttgtagattatatttaaggacaaatctttattccatgtttaatttatttagcttcccctgtagctaatatttcatgctgaacacattttaaatgctgtaaatgtagataatgtaatttatgtatcattaatgcctctttagtagtttagagaaaacgtcaaaagaaatggccccagaataagcttcttgatttgtaaaattctatgtcattggctcaaatttgtatagtatctcaaaatataaatatatagacatctcagataatatatttgaaatagcaaattcctgttagaaaataatagtacttaactagatgagaataacaggtcgccattatttgaattgtctcctattcgtttttcatttgttgtgttactcatgttttacttatgggggatatatataacttccgctgttttcagaattattgtatgcagtcagtatgagaatgcaatttaagtttccttgatgctttttcacacttctattactagaaataagaatacagtaatattggcaaagaaaattgaccagttcaataaaattttttagtaaatctgattgaaaataaacattgcttatggctttcttacatcaatattgttatgtcctagacaccttatctgaaattacggcttcaaaattctaattatgtgcaaatgtgtaaaatatcaatactttatgttcaagctggggcctcttcaggcgtcctgggctgagagagaaagatgctagctccgcaagccggggagggaacaccgccacattgttacatggacacaccgccacgtggacacatgaccagactcacatgtacagacacacggagacattaccacatggagacaccgtcacacagtcacacgaacacactggcatagtcacatggacggacacacagacatatggagaaatcacactgacacaccaccacactatcacagggacacagacacacggagacatcaccacatggacacactgtcacactaccacagggacacgagacatcacactgtcacatggacacaccatcacacacatgaacacaccgacacactgccatatggacactgccacacacactgccacactgtcacatggacacacctccataccatcacaccaccacacacactgccatgtggacacaaggacacacagacactgtcacacagatgcacaaaacactgtcacacggagacatcaccatgcagatacaccaccacatggacatagcaccagacactctgccacacagatacaccaccacacagaaatgcggacacactgccacacagacaccaccacatcgttgccacactttcatgtgtcagctggcggtgtgggccccacgactctgggctctaatcgagaaattacttggacatatagtgaaggcaaaatttttttttattttctgggtaaccaagcgcgactctgtctcaaaaaagaaaaaaaaagcaatatactgtgtaatcgttgacagcataattcactattatgtagatcggagagcagaggattctgaatgcatgaacatatcattaacatttcaatacattactcataattactgatgaactaaagagaaaccaagaaattatggtgatagttatattgacctggagaaatgtagacacaaaagaaccgtaagatgagaaatgtgttaacacagtctataagggcatgcaagaataaaaataggggagaaaacaggagagtttttcaagagctttctggtcatgtaagtcaacttgtatcggttaatttttaaaaggtttatttacatgcaataaactgcacatacttcaattgtacattttggtaattcttggcatttgtagctctataaaaccagcaacatattaaaatagcaaacatatccattacctttaccaccaaagttttcttgtgttttttctactcactttttcctgcctatccccccatctcttccacaggtaaccactgatccacttccagtcactatccatgagtttttatttccaaatacatgaaatcatatgaatttctggtttttcctgttggagcccaaggagcaagggcagaatgaggaacatgatgtttcttaccgacagttactcatgacgtctccatccaggactgaggggggcatccttctccatctaggactgggggcatccttctccatccagtattgggggtcttcctcctccatccaggacttgggggtcatcctcctccatccaggacctgaggggtgtccttttctgcgcttccttggatggcagtctttcccttcatgtttatagtgacttaccattaaatcactgtgccgttttttcctaaaaaaaaaaaaaaaaaaaaaa

SEQ ID NO: 439 - protein, 224 aa, Homo sapiens
MYRHTETLPHGDTVTQSHEHTGIVTWTDTQTYGEITLTHHHTITGTQTHGDITTWTHCHTTTGTRDITLSHGHTITHMNTPTHCHMDTATHTATLSHGHTSIPSHHHTHCHVDTRTHRHCHTDAQNTVTRRHHHADTPPHGHSTRHSATQIHHHTEMRTHCHTDTTTSLPHFHVSAGGVGPTTLGSNREITWTYSEGKIFFYFLGNQARLCLKKEKKSNILCNR

SEQ ID NO: 440 - DNA, 2493 bp, Homo sapiens
cttgcaaagtatggcaaaggcttggcaaagactataagcttttggaaaacagggactatgtcttcttcaacaatgtgtacacaacaagtagcaggttgtttggcacatggcagatgctcggcagtacatgccacactactacccttcctgctcttgtgcgcacacctaccctgatgatgcagccttcactggatatcaaaccatttatgtcttttccagtggacagtagttctgctgttgggctctttccaaattttaacacaatggatcctgtgcaaaaagcggttattaaccatacatttggagtatccattcccccaaagaagaaacaagttatttcttgtaatgtctgtcagcttcgctttaactcagatagccaggccgaggcccactacaaaggaagtaaacatgccaagaaggtcaaagcactagacgcaacgaaaaataaacccaaaatggttccttccaaggacagcgcaaaggctaatcccagctgctccatcactccaatcacaggcaacaactctgacaaatcagaagataaagggaagttaaaagccagcagttccagtcagccatcaagctctgaaagtggctcatttctcctcaaatctggcacaacacccctgccacctggagcagccacttctccctccaagagcacaaatggagctcccggtactgttgttgaatcagaagaagaaaaagccaaaaaattactttattgttcactatgcaaagtggctgtgaactccctgtcacagctagaggcacacaacacaggatctaaacacaagaccatggttgaagctcgtaatggggctggtccaattaaatcctatcctagacctggatcaagattaaagatgcagaatggcagtaaggggtcaggactacagaacaagacatttcattgtgaaatctgtgatgttcatgttaattcagaaattcaactcaaacagcacatttctagccgaaggcataaagatcgagttgcagggaaaccactgaagccaaaatacagcccttacaacaaactccagcggagcccgagtattctagcagcaaaacttgcattccagaaagatatgatgaagcctttggccccagccttcctgtcctcacctctcgcagcggcggcagccgtgtcctcagcgctgtcactcccaccccggccctctgcctcgctcttccaggctccagccattcctccagctcttctgaggcctgggcatgggcccatccgcgccactcctgcctccatcctctttgctccgtactaacgtctgcaaaccccaagacgtttgaggccagtaggaagttgagaaagaaagccacaaggattcagcaatttaagcagtttgtgttgcagtacccccattcacccacaaaatgcagcccaccacccagtcccccaattccagagagaaacacatcactagattgacgagggcttttagagactgctcctataaytgaggaatcagcagcataggctttatctccctacttcctcccccaccctaccgcgttcaatttgtgtatctcagatatttgatttcttgagcatgtattggtcagaaagaaaaagaaagaaaaccattctctatttttccatgggtatgatctggcttaaaacaatatggaatattttcctgacagacttgtattctagtgtggaacaaaaaacagtgaacacaagtgcttacttgtggatactatcttaccaacggatcacaaagttctctttttggtgtactgttgttgacagggattgtgtactgtttcgacccgagtactgctgtatcctgtgtagtactagatctgtatctcttgtctgaattaaacatttttagttgctgtgtaaatgttaggaagcaaagtagctttgaattttctctgtaagagaataaaagataaaataatgtattttctttatttcacattttatttggagatatttaaatgaaatagaaagccatataacatagctataattactacctgtttgctatttttgtttaacttattttgtagcttcctcactggtttgtgttgctaagcaaacgtatacaaacagaaaaagagcttcctaaattgcacatttttgcacctcttgtgcattctgcaagaagacaatgaatccatgtatttctatataagtatcttcttcatttttaacctgttttcatttgtaatgatgctacataattttgtggctccctaatgcaataatgtacagaagataaaaaaatttataattgaacaatttgtctttctgttcgctgaatatattgcaggtcatgctcccatgcccccctttctaagccgatatcaacaagactggaatgtttgtgatatcaggggcaagagttatcatagaacaacaaaatagagtggactcttttagagcatctatatctgcaacctgtaaatggtaaaatgtctgtgtatttttttaaatgtaccttttcaataaaagtacaaaaaata

SEQ ID NO: 441 - protein, 389 aa, Homo sapiens [sequence omitted]

SEQ ID NO: 442 - DNA, 3136 bp, Homo sapiens
cagagaggctgtatttcagtgcagcctgccagacctcttctggaggaagactggacaaagggggtcacacattccttccatacggttgagcctctacctgcctggtgctggtcacagttcagcttcttcatgatggtggatcccaatggcaatgaatccagtgctacatacttcatcctaataggcctccctggtttagaagaggctcagttctggttggccttcccattgtgctccctctaccttattgctgtgctaggtaacttgacaatcatctacattgtgcggactgagcacagcctgcatgagcccatgtatatatttctttgcatgctttcaggcattgacatcctcatctccacctcatccatgcccaaaatgctggccatcttctggttcaattccactaccatccagtttgatgcttgtctgctacagatttttgccatccactccttatctggcatggaatccacagtgctgctggccatggcttttgaccgctatgtggccatctgtcacccactgcgccatgccacagtacttacgttgcctcgtgtcaccaaaattggtgtggctgctgtggtgcggggggctgcactgatggcaccccttcctgtcttcatcaagcagctgcccttctgccgctccaatatcctttcccattcctactgcctacaccaagatgtcatgaagctggcctgtgatgatatccgggtcaatgtcgtctatggccttatcgtcatcatctccgccattggcctggactcacttctcatctccttctcatatctgcttattcttaagactgtgttgggcttgacacgtgaagcccaggccaaggcatttggcacttgcgtctctcatgtgtgtgctgtgttcatattctatgtacctttcattggattgtccatggtgcatcgctttagcaagcggcgtgactctccgctgcccgtcatcttggccaatatctatctgctggttcctcctgtgctcaacccaattgtctatggagtgaagacaaaggagattcgacagcgcatccttcgacttttccatgtggccacacacgcttcagagccctaggtgtcagtgatcaaacttcttttccattcagagtcctctgattcagattttaatgttaacattttggaagacagtattcagaaaaaaaatttccttaataaaaaatacaactcagatccttcaaatatgaaactggttggggaatctccattttttcaatattattttcttctttgttttcttgctacatataattattaataccctgactaggttgtggttggagggttattacttttcattttaccatgcagtccaaatctaaactgcttctactgatggtttacagcattctgagataagaatggtacatctagagaacatttgccaaaggcctaagcacggcaaaggaaaataaacacagaatataataaaatgagataatctagcttaaaactataacttcctcttcagaactcccaaccacattggatctcagaaaaatgctgtcttcaaaatgacttctacagagaagaaataatttttcctctggacactagcacttaaggggaagattggaagtaaagccttgaaaagagtacatttacctacgttaatgaaagttgacacactgttctgagagttttcacagcatatggaccctgtttttcctatttaattttcttatcaaccctttaattaggcaaagatattattagtaccctcattgtagccatgggaaaattgatgttcagtggggatcagtgaattaaatggggtcatacaagtataaaaattaaaaaaaaaaaagacttcatgcccaatctcatatgatgtggaagaactgttagagagaccaacagggtagtgggttagagatttccagagtcttacattttctagaggaggtatttaatttcttctcactcatccagtgttgtatttaggaatttcctggcaacagaactcatggctttaatcccactagctattgcttattgtcctggtccaattgccaattacctgtgtcttggaagaagtgatttctaggttcaccattatggaagattcttattcagaaagtctgcatagggcttatagcaagttatttatttttaaaagttccataggtgattctgataggcagtgaggttagggagccaccagttatgatgggaagtatggaatggcaggtcttgaagataacattggccttttgagtgtgactcgtagctggaaagtgagggaatcttcaggaccatgctttatttggggctttgtgcagtatggaacagggactttgagaccaggaaagcaatctgacttaggcatgggaatcaggcatttttgcttctgaggggctattaccaagggttaataggtttcatcttcaacaggatatgacaacagtgttaaccaagaaactcaaattacaaatactaaaacatgtgatcatatatgtggtaagtttcattttctttttcaatcctcaggttccctgatatggattcctataacatgctttcatccccttttgtaatggatatcatatttggaaatgcctatttaatacttgtatttgctgctggactgtaagcccatgagggcactgtttattattgaatgtcatctctgttcatcattgactgctctttgctcatcattgaatcccccagcaaagtgcctagaacataatagtgcttatgcttgacaccggttatttttcatcaaacctgattccttctgtcctgaacacatagccaggcaattttccagccttctttgagttgggtattattaaattctggccattacttccaatgtgagtggaagtgacatgtgcaatttctatacctggctcataaaaccctcccatgtgcagcctttcatgttgacattaaatgtgacttgggaagctatgtgttacacagagtaaatcaccagaagcctggatttctgaaaaaactgtgcagagccaaacctctgtcatttgcaactcccacttgtatttgtacgaggcagttggataagtgaaaaataaagtactattgtgtcaagaaaaaaaaaaaaaaaaaaaaaaaaaaaaaaaaaaaaaaaaaaaaaaaaaaaa

SEQ ID NO: 443 - protein, 317 aa, Homo sapiens
MVDPNGNESSATYFILIGLPGLEEAQFWLAFPLCSLYLIAVLGNLTIIYIVRTEHSLHEPMYIFLCMLSGIDILISTSSMPKMLAIFWFNSTTIQFDACLLQIFAIHSLSGMESTVLLAMAFDRYVAICHPLRHATVLTLPRVTKIGVAAVVRGAALMAPLPVFIKQLPFCRSNILSHSYCLHQDVMKLACDDIRVNVVYGLIVIISAIGLDSLLISFSYLLILKTVLGLTREAQAKAFGTCVSHVCAVFIFYVPFIGLSMVHRFSKRRDSPLPVILANIYLLVPPVLNPIVYGVKTKEIRQRILRLFHVATHASEP

SEQ ID NO: 444 - DNA, 1132 bp, Homo sapiens
  misc_feature 256: n = A,T,C or G
gacgcgtccgccgcctccggaactaaacggggtgaggtcacattcggttatctctaacgttggaaaacgatggagctaacacccattatggagattaaccacttttcatcaggtttttaacttaagtcgtgaggaatacaacggtgaacacaagattcattttattttcatcaccatgggacgtatcctgttgttgagttctctgggtcagacctctgaagacttctcagatggatcctagtctctgggcttgccntgaaattactcgctgctcagggagagagttgaaatggttggcatcctcccactctgttgctccggctgtgtcccctcgctctgttgttccagctatgtcccctctgttgctccaactgcagctcattctgttagagttcctcattcagctggtcactgtggccagagggtgttggcctgctcccttcctcaagtattcttaaagccatggatttttgtggagcatttttcttcctggctctcccttgagttattttcctttcttcgctatcttgggactcttctttgtgcttgcggwcatcggttgagagaaggacttcttcttccttgtctccttggtgttggctcgtggttgctcttcaacaactggactggaggctcttggttttctcttcatcttcaacaagtcagtctctctcaagggtctcacgttgcagcattcttaccagaggccattgggcctggagttccagttccagtgtctggagagtccacctcagctcagcaatctcatgccggttggcaattgtcagcagaagccgatgcctgcccatcagttctttactctgaggtgttagagtggaataaaaatataaatacttatactagttttcatgacttctgcttaatattgggtatttttttgttttgttttgttttggcggtgataggcttaccttacattaaaccaggccttagcctttctgtggctttgttatgcaaagcctcatattactctctagtctggttcagcaggacagtcaggtccacacctggggctgtttgttttctacgtttacctcaacataaggtaccttatcattgtcagccttcatctcctgatccaaaataaaataaaatgccacaggttacttga

SEQ ID NO: 445 - protein, 282 aa, Homo sapiens
NYSLLRERVEMVGILPLCCSGCVPSLCCSSYVPSVAPTAAHSVRVPHSAGHCGQRVLACSLPQVFLKPWIFVEHFSSWLSLELFSFLRYLGTLLCACGHRLREGLLLPCLLGVGSWLLFNNWTGGSWFSLHLQQVSLSQGSHVAAFLPEAIGPGVPVPVSGESTSAQQSHAGWQLSAEADACPSVLYSEVLEWNKNINTYTSFHDFCLILGIFLFCFVLAVIGLPYIKPGLSLSVALLCKASYYSLVWFSRTVRSTPGAVCFLRLPQHKVPYHCQPSSPDPK

SEQ ID NO: 446 - DNA, 961 bp, Homo sapiens
ggccacgagaccagcagcatgcacggtggcacgggcactggtctaccaggactgtccctcaggagggggtcaaacttgaggtataaggactacttcctcgtttaaggagtcggccttgaggaagcagcattcggttatctctaacgttggaaaacgatggagctaacacccattatggagattaaccacttttcatcaggtttttaacttaagtcgtgaggaatacaacggtgaacacaagattcattttattttcatcaccatgggacgtatcctgttgttgagttctctgggtcagacctctgaagacttctcagatggatcctagtctctgggcttgccctgaaattactcgctgctcagggagagagttgaaatggttggcatcctcccactctgttgctccggctgtgtcccctcgctctgttgttccagctatgtcccctctgttgctccaactgcagctcattctgttagagttcctcattcagctggtcactgtggccagagggtgttggcctgctcccttcctcaagtattcttaaagccatggatttttgtggagcatttttcttcctggctctcccttgagttattttcctttcttcgctatcttgggactcttctttgtgcttgcggtcatcggttgagagaaggacttcttcttccttgtctccttggtgttggctcgtggttgctcttcaacaactggactggaggctcttggttttctcttcatcttcaacaagtcagtctctctcaagggtctcacgttgcagcattcttaccagaggccattgggcctggagttccagttccagtgtctggagagtccacctcagctcagcaatctcatgccggttggcaattgtcagcagaagccgatgcctgcccatcagttctttactctgaggtgttagagtggaataaaaatataaatacttaaaaaaaaaaaaaaaaa

SEQ ID NO: 447 - protein, 189 aa, Homo sapiens
MVGILPLCCSGCVPSLCCSSYVPSVAPTAAHSVRVPHSAGHCGQRVLACSLPQVFLKPWIFVEHFSSWLSLELFSFLRYLGTLLCACGHRLREGLLLPCLLGVGSWLLFNNWTGGSWFSLHLQQVSLSQGSHVAAFLPEAIGPGVPVPVSGESTSAQQSHAGWQLSAEADACPSVLYSEVLEWNKNINT

SEQ ID NO: 448 - DNA, 2426 bp, Homo sapiens
gtaaattctttattgccaggagtgaaccctaaagtggctcacaagagtgccctatttctttcaattaactacaaggacaaacacatctcaaagttgagataagtgaccagtatgatttgccaaaattctaaagcgcactcaccatgaaatggataaaggttacctttggggatttgcactgcatgaattctgtgaaaagcttgttggatattgtgatagagatagagaaatgaagtatattatataagatactatgaggttccctgcctttgcttcacatcccaggcttacaaacgtgccccataaacattccctctgtggctcttgcatttcatatatttatctaaactcttataatcaaattacacttttagtatttgctgtctcatgtgatgatgaatctcatatgtgtcccttctttgcatgaagtaagatagtcaacttattcaaaactttacatcattctagatttaagagacaaggaagagcttctcaggcagaaggaataatgtatgcctgacatgttcaaggaattacaagttagattttgtttaggtgcatgggaggggttgatggtgatgacagataaggctggagggatggggagaggctgtggctgtatacagcctcagtacaaggctaagcattttaactttatactggaaaaaaaatcaaacaaaggggagggataaaggacttagtcatctttgcactggaaaacaaaatatgtaattaaattcccatagctgcatgtaacattgaattcttccaggttaaaaaaaaaagttaatcctgtgatattaatggaatgacattttgaggtcttgagaatgggcacaaaagtgggaaatgaatttcagtatgggcaaagacactgaggatgatgttgattagataattcactccgtaatgatcatgctgtgtgctagtaagtataaccctggaaagatcttgagatgcttcccagcctgttcacagatcccctgggccagaacactccttaggaaaaacagtcagctacatattaggcagcaacacgaagggtctttgaacaaaatgagtaatgttattctacagtgtagaaaggtcacagtacagatctgggaactaaatattaaaaatgagtgtggctggatatatggagaatgttgggcccagaaggaaccgtagagatcagatattacaacagctttgttttgagggttagaaatatgaaatgatttggttatgaacgcacagtttaggcagcagggccagaatcctgaccctctgccccgtggttatctcctccccagcttggctgcctcatgtcatcacagtattccattttgtttgttgcatgtcttgtgaagccatcaagattttctcgtctgttttcctctcattggtaatgctcactttgtgacttcatttcaaatctgtaatcccgttcaaataaatatccacaacaggatctgttttcctgcccatcctttaaggaacacatcaattcattttctaatgtccttccctcacaagcgggaccaggcacagggcgaggctcatcgatgacccaagatggcggccgggcatttctcccagggatctctgtgcttccttttgtgcttcctgtgtgtgtggatatttaaaggggctggaaatgtgcaaaaacatgtcactacttagacattatattgtcatcttgctgtttctagtgatgttaattatctccatttcagcagatgtgtggcctcagatggtaaagtcagcagcctttcttatttctcacctggaaatacatacgaccatttgaggagacaaatggcaaggtgtcagcataccctgaacttgagttgagagctacacacaatattattggtttccgagcatcacaaacaccctctctgtttcttcactgggcacagaattttaatacttatttcagtgggctgttggcaggaacaaatgaagcaatctacataaagtcactagtgcagtgcctgacacacaccattctcttgaggtcccctctagagatcccacaggtcatatgacttcttggggagcagtggctcacacctgtaatcccagcactttgggaggctgaggcaggtgggtcacctgaggtcaggagttcaagaccagcctggccaatatggtgaaaccccatctctactaaaaatacaaaaattagctgggcgtgctggtgcatgcctgtaatcccagctacttgggaggctgaggcaggagaattgctggaacatgggaggcggaggttgcagtgagctgtaattgtgccattgcactcgaacctgggcgacagagtggaactctgtttccaaaaaacaaacaaacaaaaaaggcatagtcagatacaacgtgggtgggatgtgtaaatagaagcaggatataaagggcatggggtgacggttttgcccaacacaatg

SEQ ID NO: 449 - protein, 105 aa, Homo sapiens
RLIDDPRWRPGISPRDLCASFCASCVCGYLKGLEMCKNMSLLRHYIVILLFLVMLIISISADVWPQMVKSAAFLISHLCIIRSFPPCRSSWSPSAAATQISPLFF

SEQ ID NO: 450 - DNA, 626 bp, Homo sapiens
ggacctgggaaggagcataggacagggcaaggcgggataaggaggggcaccacagcccttaaggcacgagggaacctcactgcgcatgctcctttggtgcccacctcagtgcgcatgttcactgggcgtcttcccatcggccccttcgccagtgtggggaacgcggcggagctgtgagccggcgactcgggtccctgaggtctggattctttctccgctactgagacacggcggacacacacaaacacagaaccacacagccagtcccaggagcccagtaatggagagccccaaaaagaagaaccagcagctgaaagtcgggatcctacacctgggcagcagacagaagaagatcaggatacagctgagatcccagtgcgcgacatggaaggtgatctgcaagagctgcatcagtcaaacaccggggataaatctggatttgggttccggcgtcaaggtgaagataatacctaaagaggaacactgtaaaatgccagaagcaggtgaagagcaaccacaagtttaaatgaagacaagctgaaacaacgcaagctggttttatattagatatttgacttaaactatctcaataaagttttgcagctttcaccaaaaaaaaaaaaaaa

SEQ ID NO: 451 - protein, 146 aa, Homo sapiens
MLLWCPPQCACSLGVFPSAPSPVWGTRRSCEPATRVPEVWILSPLLRHGGHTQTQNHTASPRSPVMESPKKKNQQLKVGILHLGSRQKKIRIQLRSQCATWKVICKSCISQTPGINLDLGSGVKVKIIPKEEHCKMPEAGEEQPQV

SEQ ID NO: 452 - DNA, 1836 bp, Homo sapiens
ggcgctgggcggctgcggcgcgcggtgcgcggtgcgtagtctggagctatggtggtggtggcagccgcgccgaacccggccgacgggacccctaaagttctgcttctgtcggggcagcccgcctccgccgccggagccccggccggccaggccctgccgctcatggtgccagcccagagaggggccagcccggaggcagcgagcggggggctgccccaggcgcgcaagcgacagcgcctcacgcacctgagccccgaggagaaggcgctgaggaggaaactgaaaaacagagtagcagctcagactgccagagatcgaaagaaggctcgaatgagtgagctggaacagcaagtggtagatttagaagaagagaaccaaaaacttttgctagaaaatcagcttttacgagagaaaactcatggccttgtagttgagaaccaggagttaagacagcgcttggggatggatgccctggttgctgaagaggaggcggaagccaaggggaatgaagtgaggccagtggccgggtctgctgagtccgcagcactcagactacgtgcacctctgcagcaggtgcaggcccagttgtcacccctccagaacatctccccatggattctggcggtattgactcttcagattcagagtctgatatcctgttgggcattctggacaacttggacccagtcatgttcttcaaatgcccttccccagagcctgccagcctggaggagctcccagaggtctacccagaaggacccagttccttaccagcctccctttctctgtcagtggggacgtcatcagccaagctggaagccattaatgaactaattcgttttgaccacatatataccaagcccctagtcttagagataccctctgagacagagagccaagctaatgtggtagtgaaaatcgaggaagcacctctcagcccctcagagaatgatcaccctgaattcattgtctcagtgaaggaagaacctgtagaagatgacctcgttccggagctgggtatctcaaatctgctttcatccagccactgcccaaagccatcttcctgcctactggatgcttacagtgactgtggatacgggggttccctttccccattcagtgacatgtcctctctgcttggtgtaaaccattcttgggaggacacttttgccaatgaactctttccccagctgattagtgtctaaggaatgatccaatactgttgcccttttccttgactattacactgcctggaggatagcagagaagcctgtctgtacttcattcaaaaagccaaaatagagagtatacagtcctagagaattcctctatttgttcagatctcatagatgacccccaggtattgtcttttgacatccagcagtccaaggtattgagacatattactggaagtaagaaatattactataattgagaactacagcttttaagattgtacttttatcttaaaagggtggtagttttccctaaaatacttattatgtaagggtcattagacaaatgtcttgaagtagacatggaatttatgaatggttctttatcatttctcttccccctttttggcatcctggcttgcctccagttttaggtcctttagtttgcttctgtaagcaacgggaacacctgctgagggggctctttccctcatgtatacttcaagtaagatcaagaatcttttgtgaaattatagaaatttactatgtaaatgcttgatggaattttttcctgctagtgtagcttctgaaaggtgctttctccatttatttaaaactacccatgcaattaaaaggtacaatgcaaaaaaaaaaaaaaaaa

SEQ ID NO: 453 - protein, 261 aa, Homo sapiens
MVVVAAAPNPADGTPKVLLLSGQPASAAGAPAGQALPLMVPAQRGASPEAASGGLPQARKRQRLTHLSPEEKALRRKLKNRVAAQTARDRKKARMSELEQQVVDLEEENQKLLLENQLLREKTHGLVVENQELRQRLGMDALVAEEEAEAKGNEVRPVAGSAESAALRLRAPLQQVQAQLSPLQNISPWILAVLTLQIQSLISCWAFWTTWTQSCSSNALPQSLPAWRSSQRSTQKDPVPYQPPFLCQWGRHQPSWKPLMN

SEQ ID NO: 454 - DNA, 753 bp, Homo sapiens
agcaagatggcggcgcaacagcgggactgcgggggtgctgcgcagctggcggggccggcggcggaggctgaccccctaggacgcttcacgtgtcccgtgtgcttagaggtgtacgagaagccggtacaggtgccctgcggacacgtcttttgctctgcatgcctgcaggaatgtctgaagccgaagaagcctgtctgtggggtgtgtcgcagcgctctggcacctggcgtccgagccgtggagctcgagcggcagatcgagagcacagagacttcttgccatggctgccgtaagaatttcttcctgtccaagatccggtcccacgtggctacttgttccaaataccagaattacatcatggaaggtgtgaaggccaccattaaggatgcatctcttcagccaaggaatgtcccaaaccgttacacctttccttgtccttactgtcctgagaagaactttgatcaggaaggacttgtggaacactgcaaattattccatagcacggataccaaatctgtggtttgtccgatatgtgcctcgatgccctggggagaccccaactaccgcagcgccaacttcagagagcacatccagcgccggcaccggttttcttatgacacttttgtggattatgatgttgatgaagaggacatgatgaatcaggtgttgcagcgctccatcatcgaccagtgagcagagtccgtgcttgctatctgtctcatgttacagagcttccattacatattaaacgtg

SEQ ID NO: 455 - protein, 228 aa, Homo sapiens
MAAQQRDCGGAAQLAGPAAEADPLGRFTCPVCLEVYEKPVQVPCGHVFCSACLQECLKPKKPVCGVCRSALAPGVRAVELERQIESTETSCHGCRKNFFLSKIRSHVATCSKYQNYIMEGVKATIKDASLQPRNVPNRYTFPCPYCPEKNFDQEGLVEHCKLFHSTDTKSVVCPICASMPWGDPNYRSANFREHIQRRHRFSYDTFVDYDVDEEDMMNQVLQRSIIDQ
